(19) United States
(12) Patent Application Publication
(10) Pub. No.: US 2014/0033368 A1
(43) Pub. Date: Jan. 30, 2014

(54) Plants Having Enhanced Yield-Related Traits and Producing Methods Thereof

(71) Applicants: Valerie Frankard, Waterloo (BE); Christophe Reuzeau, La Chapelle Gonaguet (FR); Yves Hatzfeld, Lille (FR); Steven Vandenabeele, Oudenaarde (BE); Vladimir Mironov, Trondheim (NO)

(72) Inventors: Valerie Frankard, Waterloo (BE); Christophe Reuzeau, La Chapelle Gonaguet (FR); Yves Hatzfeld, Lille (FR); Steven Vandenabeele, Oudenaarde (BE); Vladimir Mironov, Trondheim (NO)

(21) Appl. No.: 14/001,781

(22) PCT Filed: Feb. 27, 2012
(86) PCT No.: PCT/IB2012/050888

§ 371 Date: Aug. 27, 2013

Related U.S. Application Data
(60) Provisional application No. 61/447,151, filed on Feb. 28, 2011.
(60) Provisional application No. 61/467,423, filed on Mar. 25, 2011.
(60) Provisional application No. 61/483,115, filed on May 6, 2011.

(30) Foreign Application Priority Data
Feb. 28, 2011 (EP) 11156182.5
Mar. 25, 2011 (EP) 11159809.0
May 6, 2011 (EP) 11165187.3

(51) Int. Cl. C12N 15/82

(52) U.S. Cl. CPC C12N 15/8242
USPC 800/290; 435/419; 435/320.1; 530/370; 536/23.6; 800/298; 800/320; 800/320.1; 800/320.2; 800/320.3

(57) ABSTRACT

Provided are a method for enhancing yield-related traits in plants by modulating expression in a plant of a nucleic acid encoding a WAK-like polypeptide, or a CDKB-RKA polypeptide, or a UPA20-like polypeptide, and plants having modulated expression of a nucleic acid encoding a WAK-like polypeptide, or a CDKB-RKA polypeptide, or a UPA20-like polypeptide, which plants have enhanced yield-related traits relative to control plants. Also provided are WAK-like-encoding nucleic acids, or CDKB-RKA-encoding nucleic acids, or UPA20-like-encoding nucleic acids, and constructs comprising the same, useful in performing the methods for enhancing yield-related traits in plants.

### BACKGROUND

[0001] The present invention relates generally to the field of molecular biology and concerns a method for enhancing yield-related traits in plants by modulating expression in a plant of a nucleic acid encoding a WAK-like (Wall-Associated Kinase-like) polypeptide, or a UPA20-like polypeptide. The present invention also concerns plants having modulated expression of a nucleic acid encoding a WAK-like polypeptide or a UPA20-like polypeptide, which plants have enhanced yield-related traits relative to corresponding wild type plants or other control plants. The invention also provides constructs useful in the methods of the invention.

[0002] Concerning CDKB-RKA polypeptides, the present invention relates generally to the field of molecular biology and concerns a method for enhancing various economically important yield-related traits in plants. More specifically, the present invention concerns a method for enhancing yield-related traits in plants by modulating expression in a plant of a nucleic acid encoding a CDKB-RKA polypeptide wherein said CDKB-RKA is a modified CDKB polypeptide which CDKB-RKA polypeptide has modified, preferably reduced, more preferably lacks catalytic kinase activity in comparison to a full length or unmodified CDKB polypeptide. More in particularly, the present invention concerns a method for enhancing yield-related traits in plants by introducing and expressing in said plant of a nucleic acid encoding a CDKB-RKA polypeptide as defined herein. The present invention also concerns plants having modulated expression of a nucleic acid encoding said CDKB-RKA polypeptide, which plants have enhanced yield-related traits relative to control plants. The invention also provides constructs comprising the CDKB-RKA polypeptide as defined herein that are useful in performing the methods of the invention.

[0003] The ever-increasing world population and the dwindling supply of arable land available for agriculture fuels research towards increasing the efficiency of agriculture. Conventional means for crop and horticultural improvements utilise selective breeding techniques to identify plants having desirable characteristics. However, such selective breeding techniques have several drawbacks, namely that these techniques are typically labour intensive and result in plants that often contain heterogeneous genetic components that may not always result in the desirable trait being passed on from parent plants. Advances in molecular biology have allowed mankind to modify the germplasm of animals and plants. Genetic engineering of plants entails the isolation and manipulation of genetic material (typically in the form of DNA or RNA) and the subsequent introduction of that genetic material into a plant. Such technology has the capacity to deliver crops or plants having various improved economic, agronomic or horticultural traits.

[0004] A trait of particular economic interest is increased yield. Yield is normally defined as the measurable produce of economic value from a crop. This may be defined in terms of quantity and/or quality. Yield is directly dependent on several factors, for example, the number and size of the organs, plant architecture (for example, the number of branches), seed production, leaf senescence and more. Root development, nutrient uptake, stress tolerance and early vigour may also be important factors in determining yield. Optimizing the abovementioned factors may therefore contribute to increasing crop yield.

[0005] Seed yield is a particularly important trait, since the seeds of many plants are important for human and animal nutrition. Crops such as corn, rice, wheat, canola and soybean account for over half the total human caloric intake, whether through direct consumption of the seeds themselves or through consumption of meat products raised on processed seeds. They are also a source of sugars, oils and many kinds of metabolites used in industrial processes. Seeds contain an embryo (the source of new shoots and roots) and an endosperm (the source of nutrients for embryo growth during germination and during early growth of seedlings). The development of a seed involves many genes, and requires the transfer of metabolites from the roots, leaves and stems into the growing seed. The endosperm, in particular, assimilates the metabolic precursors of carbohydrates, oils and proteins and synthesizes them into storage macromolecules to fill out the grain.

[0006] Another important trait for many crops is early vigour. Improving early vigour is an important objective of modern rice breeding programs in both temperate and tropical rice cultivars. Long roots are important for proper soil anchorage in water-seeded rice. Where rice is sown directly into flooded fields, and where plants must emerge rapidly through water, longer shoots are associated with vigour. Where drill-seeding is practiced, longer mesocotyls and coleoptiles are important for good seedling emergence. The ability to engineer early vigour into plants would be of great importance in agriculture. For example, poor early vigour has been a limitation to the introduction of maize (Zea mays L.) hybrids based on Corn Belt germplasm in the European Atlantic.

[0007] A further important trait is that of improved abiotic stress tolerance. Abiotic stress is a primary cause of crop loss worldwide, reducing average yields for most major crop plants by more than 50% (Wang et al., Planta 218, 1-14, 2003). Abiotic stresses may be caused by drought, salinity, extremes of temperature, chemical toxicity and oxidative stress. The ability to improve plant tolerance to abiotic stress would be of great economic advantage to farmers worldwide and would allow for the cultivation of crops during adverse conditions and in territories where cultivation of crops may not otherwise be possible.

[0008] Crop yield may therefore be increased by optimising one of the above-mentioned factors.

[0009] Concerning WAK polypeptides, WAK polypeptides belong to the receptor-like kinase (RLK) superfamily, with from N-terminus to C-terminus an EGF domain, a transmembrane domain and a tyrosine kinase domain. They are membrane proteins, usually targeted to the plasma membrane. WAK polypeptides are covalently bound to the cell wall and they transmit information from the cell wall to the cell.

[0010] Zhang et al. (2005) identified that there are at least 125 WAKs in rice, compared to 26 WAK and WAK-like in Arabidopsis. Zhang et al. (2005) also identified via sequence analysis, 3 major classes of WAK and WAK-like polypeptides: WAK-RLK with the classical structure with from N-terminus to C-terminus an EGF domain, a transmembrane domain and a tyrosine kinase domain; WAK-RLCK which only has the kinase domain, but no EGF domain and no transmembrane domain; and WAK-RLP comprises the EGF domain and the transmembrane domain, but has no kinase domain.

[0011] Concerning CDKB-RKA polypeptides, the inherent growth mechanisms of a plant reside in a highly ordered sequence of events collectively known as the ‘cell cycle’. Progression through the cell cycle is fundamental to the growth and development of all multicellular organisms and is crucial to cell proliferation. The major components of the cell cycle are highly conserved in yeast, mammals, and plants. The cell cycle is typically divided into the following sequential phases: G0-G1-S-G2-M. DNA replication or synthesis generally takes place during the S phase (“S” is for DNA synthesis) and mitotic segregation of the chromosomes occurs during the M phase (the “M” is for mitosis), with intervening gap phases, G1 (during which cells grow before DNA replication) and G2 (a period after DNA replication during which the cell prepares for division). Cell division is completed after cytokinesis, the last step of the M phase. Cells that have exited the cell cycle and that have become quiescent are said to be in the G0 phase. Cells in this phase can be stimulated to renter the cell cycle at the G1 phase. The “G” in G1, G2 and G0 stands for “gap”. Completion of the cell cycle process allows each daughter cell during cell division to receive a full copy of the parental genome.

[0012] Cell division is controlled by two principal cell cycle events, namely initiation of DNA synthesis and initiation of mitosis. Each transition to each of these key events is controlled by a checkpoint represented by specific protein complexes (involved in DNA replication and division). The expression of genes necessary for DNA synthesis at the G1/S boundary is regulated by the E2F family of transcription factors in mammals and plant cells (La Thangue, 1994 (Curr. Opin. Cell Biol. 6 (3), 443-450); Muller et al., 2001 (Genes Dev. 15 (3), 267-285); De Veylder et al., 2002 (EMBO J. 21 (6), 1360-1368)). Entry into the cell cycle is regulated/triggered by an E2F/Rb complex that integrates signals and allows activation of transcription of cell cycle genes. The transition between the different phases of the cell cycle, and therefore progression through the cell cycle, is driven by the formation and activation of different heterodimeric serine/threonine protein kinases, generally referred to as cyclin-dependent kinases (CDKs). A prerequisite for activity of these kinases is the physical association with a specific cyclin, the timing of activation being largely dependent upon cyclin expression. Cyclin binding induces conformational changes in the N-terminal lobe of the associating CDK and contributes to the localisation and substrate specificity of the complex. Monomeric CDKs are activated when they are associated with cyclins and thus have kinase activity. Cyclin protein levels fluctuate in the cell cycle and therefore represent a major factor in determining timing of CDK activation. The periodic activation of these complexes containing cyclins and CDK during cell cycle mediates the temporal regulation of cell-cycle transitions (checkpoints). Other factors regulating CDK activity include CDK inhibitors (CKIs or ICKs, KIPs, CIPs, INKs), CDK activating kinases (CAKs), a CDK phosphatase (Cdc25) and a CDK subunit (CKS) (Mironov et al. 1999 (Plant Cell 11 (4), 509-522); Reed 1996 (Progression Cell cycle Research 2, 15-27)).

[0013] In plants, two major classes of CDKs, known as A-type and B-type CDKs, have been studied to date. The A-type CDKs regulate both the G1-to-S and G2-to-M transitions, whereas the B-type CDKs seem to control the G2-to-M checkpoint only (Hemerly et al., 1995 (EMBO J. 14 (16), 3925-3936); Magyar et al., 1997 (Plant Cell 9 (2), 223-235); Porceddu et al., 2001 (J. Biol. Chem. 276 (39) 36354-36360)). In addition, the presence of C-type CDKs and CDK-activating kinases (CAKs) has been reported (Magyar et al., 1997 (Plant Cell 9 (2), 223-235); Umeda et al., 1998 (Proc Natl Acad Sci USA. 95 (9), 5021-5026.; Joubes et al., 2001 (Plant Physiol. 126 (4), 1403-1415)), as has the presence of D-type, E-type and F-type CDKs (Vandepoele et al. 2002 (Plant Cell 14 (4), 903-916)).

[0014] Use of CDKB genes and CDKB polypeptides for increasing yield in plants has been disclosed in the prior art. For instance, US application US20070214517 discloses the use of various genes, including for instance a CDKB gene for increasing yield in plants. In another example, WO2005/024029 describes methods for improving growth characteristics of plants which comprise introducing and expressing in a plant genes encoding A or B-type cyclin-dependent kinases or variants thereof. B-type CDK nucleic acids or variants thereof are defined in WO 2005/024029 as nucleic acid/genes encoding a B-type CDK protein having: (i) a PPTALRE motif with no mismatches or with a mismatch at position 2 and/or 4 from left to right; (ii) a catalytic kinase domain; and (iii) a T-loop activation kinase domain (Magyar et al., 1997 (Plant Cell 9 (2), 223-235)).

[0015] Concerning UPA20-like polypeptides, “UPA” stands for “Upregulated by the bacterial effector protein AvrBs3”.

[0016] AvrBs3 is an effector protein produced by Xanthomonas bacteria. The Xanthomonas type III effector protein AvrBs3 was reported to modulate plant gene expression and to induce cell hypertrophy in a susceptible host plant by Marois et al. (2002, MPMI Vol. 15, No. 7, pp. 637-646). Xanthomonas campestris pv. vesicatoria bacteria expressing the type III effector protein AvrBs3 induce a hypersensitive response in pepper plants carrying the resistance gene Bs3. Marois et al. (2002) described that infection of susceptible pepper and tomato plants leads to an AvrBs3-dependent hypertrophy of the mesophyll tissue. Agrobacterium-mediated transient expression of the avrBs3 gene in tobacco and potato plants resulted in a similar phenotype. Induction of hypertrophy was shown to depend on the repeat region, nuclear localization signals, and acidic transcription activation domain (AAD) of AvrBs3, suggesting that the effector modulates the host's transcriptome. To search for host genes regulated by AvrBs3 in an AAD-dependent manner, the authors performed a cDNA-amplified fragment length polymorphism analysis of pepper mRNA populations. Thirteen AvrBs3-induced transcripts were identified and confirmed by reverse transcriptase-polymerase chain reaction. Sequence analysis revealed homologies to auxin-induced and expansin-like genes, which play a role in cell enlargement. These results suggested that some of the AvrBs3-induced genes may be involved in hypertrophy development and that Xanthomonas possess type III effectors that steer host gene expression.

[0017] Kay et al. (2007, Science, Vol 318, 648-651) showed that AvrBs3 induces the expression of a master regulator of cell size (a regulator of cell enlargement), upa20, which encodes a transcription factor containing a basic helix-loop-helix domain. They further reported that AvrBs3 binds to a conserved element in the upa20 promoter via its central repeat region and induces gene expression through its activation domain. More in particular, to isolate upa genes that are direct targets of AvrBs3 Kay et al. (2007) infected susceptible pepper plants [cultivar Early Calwonder (ECW)] with Xanthomonas strain 85-10 expressing avrBs3 or carrying an empty vector in the presence of cycloheximide, which blocks eukaryotic protein synthesis. cDNA fragments corresponding to AvrBs3-induced pepper genes were identified by the authors by suppression-subtractive hybridization and confirmed by reverse Northern analysis and reverse transcription polymerase chain reaction (RT-PCR). Among these cDNAs, the authors detected one gene, designated upa20, that encodes a putative transcription factor of the basic helix-loop-helix (bHLH) family. Kay et al (2007) described that upa20 has a complex gene structure comprising eight exons and seven introns and encodes a putative 340-amino acid bHLH transcription factor with a predicted molecular mass of 37.8 kD. The bHLH domain, which generally serves as DNA binding and dimerization domain was reported to be located in the region from amino acids 167 to 225. Agrobacterium-mediated upa20 expression demonstrated that Upa20 alone induces hypertrophy in N. benthamiana and other solanaceous plants (Kay et al. 2007). In upa20-expressing tissue of N. benthamiana, palisade and spongy parenchyma cells were strongly enlarged as compared with those in tissue of the control. The hypertrophy reaction was phenotypically similar to tissue transiently expressing avrBs3 but was faster and stronger. In addition, N- and C-terminal green fluorescent protein (GFP) fusions of Upa20 were exclusively localized to the nucleus, where they often concentrated in distinct foci (Kay et al. 2007).

[0018] UPA20-like polypeptides are part of the family of the basic/helix-loop-helix (bHLH) proteins. Basic helix-loop-helix proteins (bHLH) are a group of eukaryotic transcription factors that exert a determinative influence in a variety of developmental pathways. These transcription factors are characterised by a highly evolutionary conserved bHLH domain that mediates specific dimerisation. They facilitate the conversion of inactive monomers to trans-activating dimers at appropriate stages of development. Toledo-Ortiz and Quail (2003, The Plant Cell, Vol. 15, 1749-1770) described that bHLH proteins are a superfamily of transcription factors that bind as dimers to specific DNA target sites and that have been well characterized in non-plant eukaryotes as important regulatory components in diverse biological processes. Toledo-Ortiz and Quail (2003) performed a comprehensive computational analysis of the Arabidopsis genome sequence databases to define the scope and features of the bHLH family. Using a set of criteria derived from a previously defined consensus motif, the authors identified 147 bHLH protein-encoding genes, making this one of the largest transcription factor families in Arabidopsis. Phylogenetic analysis of the bHLH domain sequences permits classification of these genes into 21 subfamilies.

[0019] Depending on the end use, the modification of certain yield traits may be favoured over others. For example for applications such as forage or wood production, or bio-fuel resource, an increase in the vegetative parts of a plant may be desirable, and for applications such as flour, starch or oil production, an increase in seed parameters may be particularly desirable. Even amongst the seed parameters, some may be favoured over others, depending on the application. Various mechanisms may contribute to increasing seed yield, whether that is in the form of increased seed size or increased seed number.

[0020] It has now been found that various yield-related traits may be improved in plants by modulating expression in a plant of a nucleic acid encoding a WAK-like polypeptide, or a UPA20-like polypeptide in a plant.

[0021] Concerning CDKB-RKA polypeptides, it has now been found that various yield-related traits may be improved in plants by modulating expression in a plant of a nucleic acid encoding a CDKB-RKA polypeptide wherein said CDKB-RKA is a modified CDKB polypeptide which CDKB-RKA polypeptide has modified, preferably reduced, catalytic kinase activity in comparison to a full length or unmodified CDKB polypeptide.

### DETAILED DESCRIPTION OF THE INVENTION

### 1. WAK Polypeptides and UPA20-Like Polypeptides

[0022] Concerning WAK-like polypeptides, the present invention shows that modulating expression in a plant of a nucleic acid encoding a WAK-like polypeptide gives plants having enhanced yield-related traits relative to control plants.

[0023] Concerning UPA20-like polypeptides, the present invention shows that modulating expression in a plant of a nucleic acid encoding a UPA20-like polypeptide gives plants having enhanced yield-related traits relative to control plants.

[0024] According to a first embodiment, the present invention provides a method for enhancing yield-related traits in plants relative to control plants, comprising modulating expression in a plant of a nucleic acid encoding a WAK-like polypeptide, or a UPA20-like polypeptide, and optionally selecting for plants having enhanced yield-related traits. According to another embodiment, the present invention provides a method for producing plants having enhancing yield-related traits relative to control plants, wherein said method comprises the steps of modulating expression in said plant of a nucleic acid encoding a WAK-like polypeptide, or a UPA20-like polypeptide, as described herein and optionally selecting for plants having enhanced yield-related traits.

[0025] A preferred method for modulating, preferably increasing expression of a nucleic acid encoding a WAK-like polypeptide, or a UPA20-like polypeptide, is by introducing and expressing in a plant a nucleic acid encoding a WAK-like polypeptide, or a UPA20-like polypeptide.

[0026] Any reference hereinafter to a “protein useful in the methods of the invention” is taken to mean a WAK-like polypeptide, or a UPA20-like polypeptide, as defined herein. Any reference hereinafter to a “nucleic acid useful in the methods of the invention” is taken to mean a nucleic acid capable of encoding such a WAK-like polypeptide, or a UPA20-like polypeptide. The nucleic acid to be introduced into a plant (and therefore useful in performing the methods of the invention) is any nucleic acid encoding the type of protein which will now be described, hereafter also named “WAK-like nucleic acid”, or “UPA20-like nucleic acid”, or “WAK-like gene”, or “UPA20-like gene”. Concerning UPA20-like polypeptides, the term UPA20-like and UPA20 are used herein as synonyms.

[0027] A “WAK-like polypeptide” as defined herein refers to any polypeptide comprising at least an EGF domain and a transmembrane domain. The EGF domain can be defined as a Pattern-Scan PS01187 domain. Preferably, a WAK-like polypeptide according to the present invention, further comprises a tyrosine kinase domain.

[0028] The term “WAK-like” or “WAK-like polypeptide” as used herein also intends to include homologues as defined hereunder of “WAK-like polypeptide”.

[0029] Additionally or alternatively, the homologue of a WAK-like protein has in increasing order of preference at least 25%, 26%, 27%, 28%, 29%, 30%, 31%, 32%, 33%, 34%, 35%, 36%, 37%, 38%, 39%, 40%, 41%, 42%, 43%, 44%, 45%, 46%, 47%, 48%, 49%, 50%, 51%, 52%, 53%, 54%, 55%, 56%, 57%, 58%, 59%, 60%, 61%, 62%, 63%, 64%, 65%, 66%, 67%, 68%, 69%, 70%, 71%, 72%, 73%, 74%, 75%, 76%, 77%, 78%, 79%, 80%, 81%, 82%, 83%, 84%, 85%, 86%, 87%, 88%, 89%, 90%, 91%, 92%, 93%, 94%, 95%, 96%, 97%, 98%, or 99% overall sequence identity to the amino acid represented by SEQ ID NO: 2 or 4, provided that the homologous protein comprises at least an EGF domain and a transmembrane as outlined above. The overall sequence identity is determined using a global alignment algorithm, such as the Needleman Wunsch algorithm in the program GAP (GCG Wisconsin Package, Accelrys), preferably with default parameters and preferably with sequences of mature proteins (i.e. without taking into account secretion signals or transit peptides). In one embodiment the sequence identity level is determined by comparison of the polypeptide sequences over the entire length of the sequence of SEQ ID NO: 2 or 4.

[0030] Compared to overall sequence identity, the sequence identity will generally be higher when only conserved domains or motifs are considered.

[0031] A “UPA20-like polypeptide” as defined herein refers to any polypeptide comprising a bHLH domain. In a preferred embodiment, said UPA20-like gene encodes a transcription factor containing a basic helix-loop-helix domain.

[0032] A helix-loop-helix (HLH) DNA-binding domain consists of a closed bundle of four helices in a left-handed twist with two crossover connections. The HLH domain directs dimerisation, and is juxtaposed to basic regions to create a DNA interaction interface surface that recognises specific DNA sequences. Basic region/HLH (bHLH) proteins regulate diverse biological pathways.

[0033] In an embodiment, said bHLH domain comprises an amino acid sequence having at least 50% overall sequence identity, and for instance at least 51%, 52%, 53%, 54%, 55%, 56%, 57%, 58%, 59%, 60%, 61%, 62%, 63%, 64%, 65%, 66%, 67%, 68%, 69%, 70%, 71%, 72%, 73%, 74%, 75%, 76%, 77%, 78%, 79%, 80%, 81%, 82%, 83%, 84%, 85%, 86%, 87%, 88%, 89%, 90%, 91%, 92%, 93%, 94%, 95%, 96%, 97%, 98%, or 99% to the amino acid represented by SEQ ID NO: 544. In another embodiment, said bHLH domain comprises an amino acid sequence having SEQ ID NO: 544.

[0034] In a preferred embodiment a method according to the invention is provided wherein said UPA20-like polypeptide comprises one or more of the following motifs:

| | |
|---|---|
| | (SEQ ID NO: 538) |
| (i) | Motif 2: YIHVRARRGQATDSHSLAERVRRE[KR]ISERM |
| | [KR][LIF]LQ[DL]LVPGC[ND]K[IV]TGKA[LV]ML, |
| | (SEQ ID NO: 539) |
| (ii) | Motif 3: DEIINYVQSLQ[RN]QVEFLSMKLA[ST]V[NS]P |
| | [RLV]L[DY], |
| | (SEQ ID NO: 540) |
| (iii) | Motif 4: [MN][AS][RK]KRK[SA][RA]x[KG][FGS]. |

[0035] In another preferred embodiment a method according to the invention is provided wherein said UPA20-like polypeptide comprises one or more of the following motifs:

| | |
|---|---|
| | (SEQ ID NO: 541) |
| (i) | Motif 5: RVRRE[KR]ISERM[RK][MIV]LQ[ARLS] |
| | LVPGCDK[IV]TGKAL[MI]LDEIINYVQSLQNQVEFLSM, |
| | (SEQ ID NO: 542) |
| (ii) | Motif 6: [KRS]KV[HE][EGD]E[PAE]P[KAT] |
| | GYIHVRARRGQATDSHSLAE, |
| | (SEQ ID NO: 543) |
| (iii) | Motif 7: [KR][LI]AS[LMV][SN]P[VLM][LF]Y[DG] |
| | FGMD[LSR] |

[0036] Motifs 2 to 7 were derived using the MEME algorithm (Bailey and Elkan, Proceedings of the Second International Conference on Intelligent Systems for Molecular Biology, pp. 28-36, AAAI Press, Menlo Park, Calif., 1994). At each position within a MEME motif, the residues are shown that are present in the query set of sequences with a frequency higher than 0.2. Residues within square brackets represent alternatives.

[0037] More preferably, the UPA20-like polypeptide comprises in increasing order of preference, at least 2, at least 3, at least 4, at least 5, or all 6 motifs.

[0038] Alternatively or in addition thereto, an UPA20-like polypeptide according to the invention comprises a conserved domain (or motif) with at least 50%, 51%, 52%, 53%, 54%, 55%, 56%, 57%, 58%, 59%, 60%, 61%, 62%, 63%, 64%, 65%, 66%, 67%, 68%, 69%, 70%, 71%, 72%, 73%, 74%, 75%, 76%, 77%, 78%, 79%, 80%, 81%, 82%, 83%, 84%, 85%, 86%, 87%, 88%, 89%, 90%, 91%, 92%, 93%, 94%, 95%, 96%, 97%, 98%, 99% sequence identity to or consists of a conserved domain selected from any one of:
[0039] 1. amino acid 186 to 236 in SEQ ID NO: 2 (motif 8—SEQ ID NO: 556);
[0040] 2. amino acid 174 to 231 in SEQ ID NO: 2 (motif 9—SEQ ID NO: 557);
[0041] 3. amino acid 183 to 230 in SEQ ID NO: 2 (motif 10—SEQ ID NO: 558);
[0042] 4. amino acid 181 to 231 in SEQ ID NO: 2 (motif 11—SEQ ID NO: 559);
[0043] 5. amino acid 176 to 255 in SEQ ID NO: 2 (motif 12—SEQ ID NO: 560); and
[0044] 6. amino acid 176 to 257 in SEQ ID NO: 2 (motif 13—SEQ ID NO: 561).

[0045] In another embodiment, an UPA20-like polypeptide according to the invention comprises a polypeptide having any one or more of the following domains:
[0046] a domain as determined with the HMMSmart database and having accession number SM00353;
[0047] a domain as determined with the HMMPanther database and having accession number as PTHR12565:SF7 and/or PTHR12565;
[0048] a domain as determined with the HMMPfam database and having accession number PF00010;
[0049] a domain as determined with the Profile Scan database and having accession number PS50888;
[0050] a domain as determined with the Superfamily database and having accession number SSF47459; and
[0051] a domain as determined with the Gene3D database and having accession number G3DSA:4.10.280.10.

[0052] The term “UPA20-like” or “UPA20-like polypeptide” as used herein also intends to include homologues as defined hereunder of “UPA20-like polypeptide”.

[0053] Additionally or alternatively, the homologue of a UPA20-like protein has in increasing order of preference at least 25%, 26%, 27%, 28%, 29%, 30%, 31%, 32%, 33%, 34%, 35%, 36%, 37%, 38%, 39%, 40%, 41%, 42%, 43%, 44%, 45%, 46%, 47%, 48%, 49%, 50%, 51%, 52%, 53%, 54%, 55%, 56%, 57%, 58%, 59%, 60%, 61%, 62%, 63%, 64%, 65%, 66%, 67%, 68%, 69%, 70%, 71%, 72%, 73%, 74%, 75%, 76%, 77%, 78%, 79%, 80%, 81%, 82%, 83%, 84%, 85%, 86%, 87%, 88%, 89%, 90%, 91%, 92%, 93%, 94%, 95%, 96%, 97%, 98%, or 99% overall sequence identity to the amino acid represented by SEQ ID NO: 407, provided that the homologous protein comprises any one or more of the conserved motifs as outlined above. The overall sequence identity is determined using a global alignment algorithm, such as the Needleman Wunsch algorithm in the program GAP (GCG Wisconsin Package, Accelrys), preferably with default parameters and preferably with sequences of mature proteins (i.e. without taking into account secretion signals or transit peptides). Compared to overall sequence identity, the sequence identity will generally be higher when only conserved domains or motifs are considered. Preferably the motifs in a UPA20-like polypeptide have, in increasing order of preference, at least 70%, 71%, 72%, 73%, 74%, 75%, 76%, 77%, 78%, 79%, 80%, 81%, 82%, 83%, 84%, 85%, 86%, 87%, 88%, 89%, 90%, 91%, 92%, 93%, 94%, 95%, 96%, 97%, 98%, or 99% sequence identity to any one or more of the motifs represented by SEQ ID NO: 133, 134, 135, 136, 137, 138, 151, 152, 153, 154, 155, and 156 (Motifs 2 to 13).

[0054] The terms “domain”, “signature” and “motif” are defined in the “definitions” section herein.

[0055] Furthermore, WAK-like polypeptides, at least in their native form, typically have oligogalacturonides binding activity. Tools and techniques for measuring oligogalacturonides binding activity are well known in the art, as e.g. described in Decreux and Messiaen, 2005. In addition, WAK-like polypeptides, when expressed in rice according to the methods of the present invention as outlined in Examples 6 and 7, give plants having increased yield related traits, in particular increased seed yield and/or increased root biomass.

[0056] In one embodiment of the present invention the function of the nucleic acid sequences of the invention is to confer information for synthesis of the WAK-like polypeptide that increases yield or yield related traits, when such a nucleic acid sequence of the invention is transcribed and translated in a living plant cell.

[0057] Concerning UPA20-like polypeptides, the polypeptide sequence which when used in the construction of a phylogenetic tree, such as the one depicted in FIG. 9, preferably clusters with the group of UPA20-like polypeptides comprising the amino acid sequence represented by SEQ ID NO: 407 rather than with any other group. The group of UPA20-like polypeptides comprising the amino acid sequence represented by SEQ ID NO: 407 is also denoted as Clade A (see also Table A3).

[0058] Furthermore, UPA20-like polypeptides (at least in their native form) typically have DNA binding activity. Tools and techniques for measuring DNA binding activity are well known in the art and are therefore not detailed herein. In addition, UPA20-like polypeptides, when expressed in rice according to the methods of the present invention as outlined in Examples 6 and 7, give plants having increased yield related traits, in particular increased biomass, including above ground biomass (area max) and root biomass (root max and root thick max); and increased seed yield, including total weight of seeds, harvest index, number of filled seeds, number of flowers per panicle and fill rate as compared to control plants.

[0059] Concerning WAK-like polypeptides, the present invention is illustrated by transforming plants with the nucleic acid sequence represented by SEQ ID NO: 1, encoding the polypeptide sequence of SEQ ID NO: 2; as well as by transforming plants with the nucleic acid sequence represented by SEQ ID NO: 3, encoding the polypeptide sequence of SEQ ID NO: 4. However, performance of the invention is not restricted to these sequences; the methods of the invention may advantageously be performed using any WAK-like-encoding nucleic acid or WAK-like polypeptide as defined herein.

[0060] Examples of nucleic acids encoding WAK-like polypeptides are given in Table A1 of the Examples section herein. Nucleic acids useful in performing the methods of the invention can be chosen from Table A1, provided these nucleic acids encode polypeptides which comprise an EGF domain and a transmembrane domain. The amino acid sequences useful in performing the methods of the invention can be chosen from Table A1, provided these polypeptides comprise an EGF domain and a transmembrane domain and as such are example sequences of orthologues and paralogues of the WAK-like polypeptide represented by SEQ ID NO: 2, the terms “orthologues” and “paralogues” being as defined herein. Further orthologues and paralogues may readily be identified by performing a so-called reciprocal blast search as described in the definitions section; where the query sequence is SEQ ID NO: 1 or SEQ ID NO: 2, the second BLAST (back-BLAST) would be against rice sequences.

[0061] The invention also provides hitherto unknown WAK-like-encoding nucleic acids and WAK-like polypeptides useful for conferring enhanced yield-related traits in plants relative to control plants.

[0062] According to a further embodiment of the present invention, there is therefore provided an isolated nucleic acid molecule selected from:
[0063] (i) a nucleic acid represented by any one of SEQ ID NO: 3, 5, 7 or 9;
[0064] (ii) the complement of a nucleic acid represented by any one of SEQ ID NO: 3, 5, 7 or 9;
[0065] (iii) a nucleic acid encoding a WAK-like polypeptide having in increasing order of preference at least 50%, 51%, 52%, 53%, 54%, 55%, 56%, 57%, 58%, 59%, 60%, 61%, 62%, 63%, 64%, 65%, 66%, 67%, 68%, 69%, 70%, 71%, 72%, 73%, 74%, 75%, 76%, 77%, 78%, 79%, 80%, 81%, 82%, 83%, 84%, 85%, 86%, 87%, 88%, 89%, 90%, 91%, 92%, 93%, 94%, 95%, 96%, 97%, 98%, or 99% sequence identity to the amino acid sequence represented by any one of SEQ ID NO: 4, 6, 8 or 10, and additionally comprising an EGF domain and a transmembrane domain, and further preferably conferring enhanced yield-related traits relative to control plants.
[0066] (iv) a nucleic acid molecule which hybridizes with a nucleic acid molecule of (i) to (iii) under high stringency hybridization conditions and preferably confers enhanced yield-related traits relative to control plants.

[0067] According to a further embodiment of the present invention, there is also provided an isolated polypeptide selected from:
[0068] (i) an amino acid sequence represented by any one of SEQ ID NO: 4, 6, 8 or 10;
[0069] (ii) an amino acid sequence having, in increasing order of preference, at least 50%, 51%, 52%, 53%, 54%, 55%, 56%, 57%, 58%, 59%, 60%, 81%, 62%, 63%, 64%, 65%, 66%, 67%, 68%, 69%, 70%, 71%, 72%, 73%, 74%, 75%, 76%, 77%, 78%, 79%, 80%, 81%, 82%, 83%, 84%, 85%, 86%, 87%, 88%, 89%, 90%, 91%, 92%, 93%, 94%, 95%, 96%, 97%, 98%, or 99% sequence identity to the amino acid sequence represented by any one of SEQ ID NO: 4, 6, 8 or 10, and additionally comprising an EGF domain and a transmembrane domain, and further preferably conferring enhanced yield-related traits relative to control plants;
[0070] (iii) derivatives of any of the amino acid sequences given in (i) or (ii) above.

[0071] Concerning UP20-like polypeptides, the present invention is illustrated by transforming plants with the nucleic acid sequence represented by SEQ ID NO: 406, encoding the polypeptide sequence of SEQ ID NO: 407. However, performance of the invention is not restricted to these sequences; the methods of the invention may advantageously be performed using any UPA20-like-encoding nucleic acid or UPA20-like polypeptide as defined herein.

[0072] Examples of nucleic acids encoding UPA20-like polypeptides are given in Table A3 of the Examples section herein. Such nucleic acids are useful in performing the methods of the invention. The amino acid sequences given in Table A3 of the Examples section are example sequences of orthologues and paralogues of the UPA20-like polypeptide represented by SEQ ID NO: 407, the terms “orthologues” and “paralogues” being as defined herein. Further orthologues and paralogues may readily be identified by performing a so-called reciprocal blast search as described in the definitions section; where the query sequence is SEQ ID NO: 406 or SEQ ID NO: 407, the second BLAST (back-BLAST) would be against poplar sequences.

[0073] The invention also provides hitherto unknown UPA20-like encoding nucleic acids and UPA20-like polypeptides useful for conferring enhanced yield-related traits in plants relative to control plants.

[0074] According to a further embodiment of the present invention, there is therefore provided an isolated nucleic acid molecule selected from:

[0075] According to a further embodiment of the present invention, there is therefore provided an isolated nucleic acid molecule selected from:
[0076] (i) a nucleic acid represented by any one of SEQ ID NO: 458, 460 and 496;
[0077] (ii) the complement of a nucleic acid represented by any one of SEQ ID NO: 458, 460 and 496;
[0078] (iii) a nucleic acid encoding a UPA20-like polypeptide having in increasing order of preference at least 50%, 51%, 52%, 53%, 54%, 55%, 56%, 57%, 58%, 59%, 60%, 61%, 62%, 63%, 64%, 65%, 66%, 67%, 68%, 69%, 70%, 71%, 72%, 73%, 74%, 75%, 76%, 77%, 78%, 79%, 80%, 81%, 82%, 83%, 84%, 85%, 86%, 87%, 88%, 89%, 90%, 91%, 92%, 93%, 94%, 95%, 96%, 97%, 98%, or 99% sequence identity to the amino acid sequence represented by any one of SEQ ID NO: 459, 461 and 497, and additionally or alternatively comprising one or more motifs having in increasing order of preference at least 50%, 55%, 60%, 65%, 70%, 75%, 80%, 85%, 90%, 95%, 96%, 97%, 98%, 99% or more sequence identity to any one or more of the motifs given in SEQ ID NO: 538, 539, 540, 541, 542, 543, 556, 557, 558, 559, 560, and 561 (motifs 2 to 13), and further preferably conferring enhanced yield-related traits relative to control plants.
[0079] (iv) a nucleic acid molecule which hybridizes with a nucleic acid molecule of (i) to (iii) under high stringency hybridization conditions and preferably confers enhanced yield-related traits relative to control plants.

[0080] According to another embodiment of the present invention, there is also provided an isolated polypeptide selected from:
[0081] (i) an amino acid sequence represented by any one of SEQ ID NO: 459, 461 and 497;
[0082] (ii) an amino acid sequence having, in increasing order of preference, at least 50%, 51%, 52%, 53%, 54%, 55%, 56%, 57%, 58%, 59%, 60%, 61%, 62%, 63%, 64%, 65%, 66%, 67%, 68%, 69%, 70%, 71%, 72%, 73%, 74%, 75%, 76%, 77%, 78%, 79%, 80%, 81%, 82%, 83%, 84%, 85%, 86%, 87%, 88%, 89%, 90%, 91%, 92%, 93%, 94%, 95%, 96%, 97%, 98%, or 99% sequence identity to the amino acid sequence represented by any one of SEQ ID NO: 459, 461 and 497, and additionally or alternatively comprising one or more motifs having in increasing order of preference at least 50%, 55%, 60%, 65%, 70%, 75%, 80%, 85%, 90%, 95%, 96%, 97%, 98%, 99% or more sequence identity to any one or more of the motifs given in SEQ ID NO: 538, 539, 540, 541, 542, 543, 556, 557, 558, 559, 560, and 561 (motifs 2 to 13) and further preferably conferring enhanced yield-related traits relative to control plants;
[0083] (iii) derivatives of any of the amino acid sequences given in (i) or (ii) above.

[0084] Nucleic acid variants may also be useful in practising the methods of the invention. Examples of such variants include nucleic acids encoding homologues and derivatives of any one of the amino acid sequences given in Table A1 of the Examples section, provided that these polypeptides comprise an EGF domain and a transmembrane domain, or Table A3 of the Examples section, the terms “homologue” and “derivative” being as defined herein. Also useful in the methods of the invention are nucleic acids encoding homologues and derivatives of orthologues or paralogues of any one of the amino acid sequences given in Table A1 of the Examples section, provided that these polypeptides comprise an EGF domain and a transmembrane domain, or Table A3 of the Examples section. Homologues and derivatives useful in the methods of the present invention have substantially the same biological and functional activity as the unmodified protein from which they are derived. Further variants useful in practising the methods of the invention are variants in which codon usage is optimised or in which miRNA target sites are removed.

[0085] Further nucleic acid variants useful in practising the methods of the invention include portions of nucleic acids encoding WAK-like polypeptides, or UPA20-like polypeptides, nucleic acids hybridising to nucleic acids encoding WAK-like polypeptides, or UPA20-like polypeptides, splice variants of nucleic acids encoding WAK-like polypeptides, or UPA20-like polypeptides, allelic variants of nucleic acids encoding WAK-like polypeptides, or UPA20-like polypeptides, and variants of nucleic acids encoding WAK-like polypeptides, or UPA20-like polypeptides, obtained by gene shuffling. The terms hybridising sequence, splice variant, allelic variant and gene shuffling are as described herein.

[0086] Nucleic acids encoding WAK-like polypeptides, or UPA20-like polypeptides, need not be full-length nucleic acids, since performance of the methods of the invention does not rely on the use of full-length nucleic acid sequences. According to the present invention, there is provided a method for enhancing yield-related traits in plants, comprising introducing and expressing in a plant a portion of any one of the nucleic acid sequences given in Table A1 of the Examples section, provided that these polypeptides comprise an EGF domain and a transmembrane domain, or Table A3 of the Examples section, or a portion of a nucleic acid encoding an orthologue, paralogue or homologue of any of the amino acid sequences given in Table A1 of the Examples section, provided that these polypeptides comprise an EGF domain and a transmembrane domain, or Table A3 of the Examples section.

[0087] A portion of a nucleic acid may be prepared, for example, by making one or more deletions to the nucleic acid. The portions may be used in isolated form or they may be fused to other coding (or non-coding) sequences in order to, for example, produce a protein that combines several activities. When fused to other coding sequences, the resultant polypeptide produced upon translation may be bigger than that predicted for the protein portion.

[0088] Concerning WAK-like polypeptides, portions useful in the methods of the invention, encode a WAK-like polypeptide as defined herein, and have substantially the same biological activity as the amino acid sequences given in Table A1 of the Examples section, provided these polypeptides comprise an EGF domain and a transmembrane domain. Preferably, the portion is a portion of any one of the nucleic acids given in Table A1 of the Examples section, or is a portion of a nucleic acid encoding an orthologue or paralogue of any one of the amino acid sequences given in Table A1 of the Examples section, provided these nucleic acids encode polypeptides comprising an EGF domain and a transmembrane domain. Preferably the portion is at least 50, 100, 150, 200, 250, 300, 350, 400, 450, 500, 550, 600, 650, 700, 750, 800, 850, 900, 950, 1000, 1050, 1100 consecutive nucleotides in length, the consecutive nucleotides being of any one of the nucleic acid sequences given in Table A1 of the Examples section, or of a nucleic acid encoding an orthologue or paralogue of any one of the amino acid sequences given in Table A1 of the Examples section, provided these nucleic acids encode polypeptides comprising an EGF domain and a transmembrane domain. Most preferably the portion is a portion of the nucleic acid of SEQ ID NO: 1, provided the nucleic acid encodes a polypeptide comprising an EGF domain and a transmembrane domain.

[0089] Concerning UPA20-like polypeptides, portions useful in the methods of the invention, encode a UPA20-like polypeptide as defined herein, and have substantially the same biological activity as the amino acid sequences given in Table A3 of the Examples section. Preferably, the portion is a portion of any one of the nucleic acids given in Table A3 of the Examples section, or is a portion of a nucleic acid encoding an orthologue or paralogue of any one of the amino acid sequences given in Table A3 of the Examples section. Preferably the portion is at least 550, 600, 650, 700, 750, 800, 850, 900, 950, 1000, 1050, 1100, 1150, 1200, 1250, 1300, 1350, 1400, 1450, 1500, 1550, 1600, 1650, 1700, 1750 consecutive nucleotides in length, the consecutive nucleotides being of any one of the nucleic acid sequences given in Table A3 of the Examples section, or of a nucleic acid encoding an orthologue or paralogue of any one of the amino acid sequences given in Table A3 of the Examples section.

[0090] Preferably, the portion encodes a fragment of an amino acid sequence which has one or more of the following characteristics:
[0091] when used in the construction of a phylogenetic tree, such as the one depicted in FIG. 9, clusters with the group of polypeptides comprising the amino acid sequence represented by SEQ ID NO: 407 (Clade A) rather than with any other group;
[0092] comprises a bHLH domain as defined herein,
[0093] comprises any one or more of the motifs 2 to 13 as provided herein,
[0094] has DNA binding activity, and
[0095] has at least 30% sequence identity to SEQ ID NO: 407.

[0096] Most preferably the portion is a portion of the nucleic acid of SEQ ID NO: 406.

[0097] Another nucleic acid variant useful in the methods of the invention is a nucleic acid capable of hybridising, under reduced stringency conditions, preferably under stringent conditions, with a nucleic acid encoding a WAK-like polypeptide, or a UPA20-like polypeptide, as defined herein, or with a portion as defined herein.

[0098] According to the present invention, there is provided a method for enhancing yield-related traits in plants, comprising introducing and expressing in a plant a nucleic acid capable of hybridizing to any one of the nucleic acids given in Table A1 of the Examples section, provided that these polypeptides comprise an EGF domain and a transmembrane domain, or Table A3 of the Examples section, or comprising introducing and expressing in a plant a nucleic acid capable of hybridising to a nucleic acid encoding an orthologue, paralogue or homologue of any of the nucleic acid sequences given in Table A1 of the Examples section, provided that these polypeptides comprise an EGF domain and a transmembrane domain, or Table A3 of the Examples section.

[0099] Concerning WAK-like polypeptides, hybridising sequences useful in the methods of the invention encode a WAK-like polypeptide as defined herein, having substantially the same biological activity as the amino acid sequences given in Table A1 of the Examples section, provided these nucleic acids encode polypeptides comprising an EGF domain and a transmembrane domain. Preferably, the hybridising sequence is capable of hybridising to the complement of any one of the nucleic acids given in Table A1 of the Examples section, or to a portion of any of these sequences, a portion being as defined above, or the hybridising sequence is capable of hybridising to the complement of a nucleic acid encoding an orthologue or paralogue of any one of the amino acid sequences given in Table A1 of the Examples section, provided these nucleic acids encode polypeptides comprising an EGF domain and a transmembrane domain. Most preferably, the hybridising sequence is capable of hybridising to the complement of a nucleic acid as represented by SEQ ID NO: 1 or to a portion thereof. In one embodiment, the hybridization conditions are of medium stringency, preferably of high stringency, as defined above.

[0100] Concerning UPA20-like polypeptides, hybridising sequences useful in the methods of the invention encode a UPA20-like polypeptide as defined herein, having substantially the same biological activity as the amino acid sequences given in Table A3 of the Examples section. Preferably, the hybridising sequence is capable of hybridising to the complement of any one of the nucleic acids given in Table A3 of the Examples section, or to a portion of any of these sequences, a portion being as defined above, or the hybridising sequence is capable of hybridising to the complement of a nucleic acid encoding an orthologue or paralogue of any one of the amino acid sequences given in Table A3 of the Examples section. Most preferably, the hybridising sequence is capable of hybridising to the complement of a nucleic acid as represented by SEQ ID NO: 406 or to a portion thereof.

[0101] Preferably, the hybridising sequence encodes a polypeptide with an amino acid sequence which has one or more of the following characteristics:
[0102] when used in the construction of a phylogenetic tree, such as the one depicted in FIG. 9, clusters with the group of polypeptides comprising the amino acid sequence represented by SEQ ID NO: 407 (Clade A) rather than with any other group;
[0103] comprises a bHLH domain as defined herein,
[0104] comprises any one or more of the motifs 2 to 13 as provided herein,
[0105] has DNA binding activity, and
[0106] has at least 30% sequence identity to SEQ ID NO: 407.

[0107] Another nucleic acid variant useful in the methods of the invention is a splice variant encoding a WAK-like polypeptide, or a UPA20-like polypeptide, as defined hereinabove, a splice variant being as defined herein.

[0108] In another embodiment, there is provided a method for enhancing yield-related traits in plants, comprising introducing and expressing in a plant a splice variant of a nucleic acid encoding any one of the proteins given in Table A1 of the Examples section, provided that these polypeptides comprise an EGF domain and a transmembrane domain, or Table A3 of the Examples section, or a splice variant of a nucleic acid encoding an orthologue, paralogue or homologue of any of the amino acid sequences given in Table A1 of the Examples section, provided that these polypeptides comprise an EGF domain and a transmembrane domain, or Table A3 of the Examples section.

[0109] Concerning WAK-like polypeptides, preferred splice variants are splice variants of a nucleic acid represented by SEQ ID NO: 1 or 3, or a splice variant of a nucleic acid encoding an orthologue or paralogue of SEQ ID NO: 2 or 4, provided these nucleic acids encode polypeptides comprising an EGF domain and a transmembrane domain.

[0110] Concerning UPA20-like polypeptides, preferred splice variants are splice variants of a nucleic acid represented by SEQ ID NO: 406, or a splice variant of a nucleic acid encoding an orthologue or paralogue of SEQ ID NO: 407. Preferably, the amino acid sequence encoded by the splice variant, has one or more of the following characteristics:
[0111] when used in the construction of a phylogenetic tree, such as the one depicted in FIG. 9, clusters with the group of polypeptides comprising the amino acid sequence represented by SEQ ID NO: 407 (Clade A) rather than with any other group;
[0112] comprises a bHLH domain as defined herein,
[0113] comprises any one or more of the motifs 2 to 13 as provided herein,
[0114] has DNA binding activity, and
[0115] has at least 30% sequence identity to SEQ ID NO: 407.

[0116] Another nucleic acid variant useful in performing the methods of the invention is an allelic variant of a nucleic acid encoding a WAK-like polypeptide, or a UPA20-like polypeptide, as defined hereinabove, an allelic variant being as defined herein.

[0117] In yet another embodiment, there is provided a method for enhancing yield-related traits in plants, comprising introducing and expressing in a plant an allelic variant of a nucleic acid encoding any one of the proteins given in Table A1 of the Examples section, provided that these polypeptides comprise an EGF domain and a transmembrane domain, or Table A3 of the Examples section, or comprising introducing and expressing in a plant an allelic variant of a nucleic acid encoding an orthologue, paralogue or homologue of any of the amino acid sequences given in Table A1 of the Examples section, provided that these polypeptides comprise an EGF domain and a transmembrane domain, or Table A3 of the Examples section.

[0118] Concerning WAK-like polypeptides, the polypeptides encoded by allelic variants useful in the methods of the present invention have substantially the same biological activity as the WAK-like polypeptide of SEQ ID NO: 2 or 4 and any of the amino acids depicted in Table A1 of the Examples section provided these nucleic acids encode polypeptides comprising an EGF domain and a transmembrane domain. Allelic variants exist in nature, and encompassed within the methods of the present invention is the use of these natural alleles. Preferably, the allelic variant is an allelic variant of SEQ ID NO: 1 or 3 or an allelic variant of a nucleic acid encoding an orthologue or paralogue of SEQ ID NO: 2 or 4, provided these nucleic acids encode polypeptides comprising an EGF domain and a transmembrane domain.

[0119] Concerning UPA20-like polypeptides, the polypeptides encoded by allelic variants useful in the methods of the present invention have substantially the same biological activity as the UPA20-like polypeptide of SEQ ID NO: 407 and any of the amino acids depicted in Table A3 of the Examples section. Allelic variants exist in nature, and encompassed within the methods of the present invention is the use of these natural alleles. Preferably, the allelic variant is an allelic variant of SEQ ID NO: 406 or an allelic variant of a nucleic acid encoding an orthologue or paralogue of SEQ ID NO: 407.

[0120] Preferably, the amino acid sequence encoded by the allelic variant, has one or more of the following characteristics:
[0121] when used in the construction of a phylogenetic tree, such as the one depicted in FIG. 9, clusters with the group of polypeptides comprising the amino acid sequence represented by SEQ ID NO: 407 (Clade A) rather than with any other group;
[0122] comprises a bHLH domain as defined herein,
[0123] comprises any one or more of the motifs 2 to 13 as provided herein,
[0124] has DNA binding activity, and
[0125] has at least 30% sequence identity to SEQ ID NO: 407.

[0126] Gene shuffling or directed evolution may also be used to generate variants of nucleic acids encoding WAK-like polypeptides, or UPA20-like polypeptides, as defined above; the term “gene shuffling” being as defined herein.

[0127] Concerning WAK-like polypeptides, according to the present invention, there is provided a method for enhancing yield-related traits in plants, comprising introducing and expressing in a plant a variant of any one of the nucleic acid sequences given in Table A1 of the Examples section provided these nucleic acids encode polypeptides comprising an EGF domain and a transmembrane domain, or comprising introducing and expressing in a plant a variant of a nucleic acid encoding an orthologue, paralogue or homologue of any of the amino acid sequences given in Table A1 of the Examples section, provided these nucleic acids encode polypeptides comprising an EGF domain and a transmembrane domain, which variant nucleic acid is obtained by gene shuffling.

[0128] Concerning UPA20-like polypeptides, according to the present invention, there is provided a method for enhancing yield-related traits in plants, comprising introducing and expressing in a plant a variant of any one of the nucleic acid sequences given in Table A3 of the Examples section, or comprising introducing and expressing in a plant a variant of a nucleic acid encoding an orthologue, paralogue or homologue of any of the amino acid sequences given in Table A3 of the Examples section, which variant nucleic acid is obtained by gene shuffling.

[0129] Preferably, the amino acid sequence encoded by the variant nucleic acid obtained by gene shuffling, has one or more of the following characteristics:
[0130] when used in the construction of a phylogenetic tree, such as the one depicted in FIG. 9, clusters with the group of polypeptides comprising the amino acid sequence represented by SEQ ID NO: 407 (Clade A) rather than with any other group;
[0131] comprises a bHLH domain as defined herein,
[0132] comprises any one or more of the motifs 2 to 13 as provided herein,
[0133] has DNA binding activity, and
[0134] has at least 30% sequence identity to SEQ ID NO: 407.

[0135] Furthermore, nucleic acid variants may also be obtained by site-directed mutagenesis. Several methods are available to achieve site-directed mutagenesis, the most common being PCR based methods (Current Protocols in Molecular Biology. Wiley Eds.).

[0136] WAK-like polypeptides differing from the sequence of SEQ ID NO: 2 or 4 by one or several amino acids (substitution(s), insertion(s) and/or deletion(s) as defined above) may equally be useful to increase the yield of plants in the methods and constructs and plants of the invention, provided these polypeptides comprise an EGF domain and a transmembrane domain.

[0137] Nucleic acids encoding WAK-like polypeptides may be derived from any natural or artificial source. The nucleic acid may be modified from its native form in composition and/or genomic environment through deliberate human manipulation. Preferably the WAK-like polypeptide-encoding nucleic acid is from a plant, further preferably from a monocotyledonous plant, more preferably from the family Poaceae, most preferably the nucleic acid is from Oryza sativa.

[0138] In another embodiment the present invention extends to recombinant chromosomal DNA comprising a nucleic acid sequence useful in the methods of the invention, wherein said nucleic acid is present in the chromosomal DNA as a result of recombinant methods, but is not in its natural genetic environment. In a further embodiment the recombinant chromosomal DNA of the invention is comprised in a plant cell.

[0139] Nucleic acids encoding UPA20-like polypeptides may be derived from any natural or artificial source. The nucleic acid may be modified from its native form in composition and/or genomic environment through deliberate human manipulation.

[0140] In a preferred embodiment, the UPA20-like polypeptide-encoding nucleic acid is from a plant, preferably from a dicotyledonous plant, further preferably from the family Salicaceae, more preferably from the genus Populus, most preferably the nucleic acid is from Populus trichocarpa. In another preferred embodiment, the UPA20-like polypeptide-encoding nucleic acid is from a plant, preferably from a dicotyledonous plant, further preferably from the family Brassicaceae, more preferably from the genus Arabidopsis, most preferably the nucleic acid is from Arabidopsis thaliana. In yet another preferred embodiment, the UPA20-like polypeptide-encoding nucleic acid is from a plant, preferably from a monocotyledonous plant, further preferably from the family Poaceae, more preferably from the genus Oryza, most preferably the nucleic acid is from Oryza sativa.

[0141] In another embodiment the present invention extends to recombinant chromosomal DNA comprising a nucleic acid sequence useful in the methods of the invention, wherein said nucleic acid is present in the chromosomal DNA as a result of recombinant methods, i.e. said nucleic acid is not in the chromosomal DNA in its natural genetic environment. In a further embodiment the recombinant chromosomal DNA of the invention is comprised in a plant cell.

[0142] Performance of the methods of the invention gives plants having enhanced yield-related traits. In particular performance of the methods of the invention gives plants having increased yield, especially increased seed yield and/or increased root biomass relative to control plants. The terms “yield”, “seed yield” and “root biomass” are described in more detail in the “definitions” section herein.

[0143] Reference herein to enhanced yield-related traits is taken to mean an increase early in vigour and/or in biomass (weight) of one or more parts of a plant, which may include (i) aboveground parts and preferably aboveground harvestable parts and/or (ii) parts below ground and preferably harvestable below ground. In particular, such harvestable parts are seeds, and performance of the methods of the invention results in plants having increased seed yield relative to the seed yield of control plants.

[0144] The present invention provides a method for increasing yield-related traits and yield, especially seed yield and/or root biomass of plants, relative to control plants, which method comprises modulating expression in a plant of a nucleic acid encoding a WAK-like polypeptide as defined herein.

[0145] The present invention also provides a method for increasing yield-related traits, preferably for increasing yield more preferably for increasing biomass as defined herein and/or for increasing seed yield as defined herein, relative to control plants, which method comprises modulating expression in a plant of a nucleic acid encoding a UPA20-like polypeptide as defined herein.

[0146] According to a preferred feature of the present invention, performance of the methods of the invention gives plants having an increased growth rate relative to control plants. Therefore, according to the present invention, there is provided a method for increasing the growth rate of plants, which method comprises modulating expression in a plant of a nucleic acid encoding a WAK-like polypeptide, or a UPA20-like polypeptide, as defined herein.

[0147] Performance of the methods of the invention gives plants grown under non-stress conditions or under mild drought conditions increased yield-related traits relative to control plants grown under comparable conditions. Therefore, according to the present invention, there is provided a method for increasing yield-related traits in plants grown under non-stress conditions or under mild drought conditions, which method comprises modulating expression in a plant of a nucleic acid encoding a WAK-like polypeptide, or a UPA20-like polypeptide.

[0148] Performance of the methods of the invention gives plants grown under conditions of drought, increased yield-related traits relative to control plants grown under comparable conditions. Therefore, according to the present invention, there is provided a method for increasing yield-related traits in plants grown under conditions of drought which method comprises modulating expression in a plant of a nucleic acid encoding a WAK-like polypeptide, or a UPA20-like polypeptide.

[0149] Performance of the methods of the invention gives plants grown under conditions of nutrient deficiency, particularly under conditions of nitrogen deficiency, increased yield-related traits relative to control plants grown under comparable conditions. Therefore, according to the present invention, there is provided a method for increasing yield-related traits in plants grown under conditions of nutrient deficiency, which method comprises modulating expression in a plant of a nucleic acid encoding a WAK-like polypeptide, or a UPA20-like polypeptide.

[0150] Performance of the methods of the invention gives plants grown under conditions of salt stress, increased yield-related traits relative to control plants grown under comparable conditions. Therefore, according to the present invention, there is provided a method for increasing yield-related traits in plants grown under conditions of salt stress, which method comprises modulating expression in a plant of a nucleic acid encoding a WAK-like polypeptide, or a UPA20-like polypeptide.

[0151] Concerning WAK-like polypeptides, the invention also provides genetic constructs and vectors to facilitate introduction and/or expression in plants of nucleic acids encoding WAK-like polypeptides. The gene constructs may be inserted into vectors, which may be commercially available, suitable for transforming into plants or host cells and suitable for expression of the gene of interest in the transformed cells. The invention also provides use of a gene construct as defined herein in the methods of the invention.

[0152] More specifically, the present invention provides a construct comprising:
[0153] (a) a nucleic acid encoding a WAK-like polypeptide as defined above;
[0154] (b) one or more control sequences capable of driving expression of the nucleic acid sequence of (a); and optionally
[0155] (c) a transcription termination sequence.

[0156] Preferably, the nucleic acid encoding a WAK-like polypeptide is as defined above. The term “control sequence” and “termination sequence” are as defined herein.

[0157] Concerning UPA20-like polyeptides, the invention also provides genetic constructs and vectors to facilitate introduction and/or expression in plants of nucleic acids encoding UPA20-like polypeptides. The gene constructs may be inserted into vectors, which may be commercially available, suitable for transforming into plants or host cells and suitable for expression of the gene of interest in the transformed cells. The invention also provides use of a gene construct as defined herein in the methods of the invention.

[0158] More specifically, the present invention provides a construct comprising:
[0159] (a) a nucleic acid encoding a UPA20-like polypeptide as defined above;
[0160] (b) one or more control sequences capable of driving expression of the nucleic acid sequence of (a); and optionally
[0161] (c) a transcription termination sequence.

[0162] Preferably, the nucleic acid encoding a UPA20-like polypeptide is as defined above. The term “control sequence” and “termination sequence” are as defined herein.

[0163] The genetic construct of the invention may be comprised in a host cell, plant cell, seed, agricultural product or plant. Plants or host cells are transformed with a genetic construct such as a vector or an expression cassette comprising any of the nucleic acids described above. Thus the invention furthermore provides plants or host cells transformed with a construct as described above. In particular, the invention provides plants transformed with a construct as described above, which plants have increased yield-related traits as described herein.

[0164] In one embodiment the genetic construct of the invention confers increased yield or yield related trait(s) to a plant when it has been introduced into said plant, which plant expresses the nucleic acid encoding the WAK-like polypeptide, or the UPA20-like polypeptide, comprised in the genetic construct. In another embodiment the genetic construct of the invention confers increased yield or yield related traits(s) to a plant comprising plant cells in which the construct has been introduced, which plant cells express the nucleic acid encoding the WAK-like polypeptide, or the UPA20-like polypeptide, comprised in the genetic construct.

[0165] The skilled artisan is well aware of the genetic elements that must be present on the genetic construct in order to successfully transform, select and propagate host cells containing the sequence of interest. The sequence of interest is operably linked to one or more control sequences (at least to a promoter).

[0166] Advantageously, any type of promoter, whether natural or synthetic, may be used to drive expression of the nucleic acid sequence, but preferably the promoter is of plant origin. A constitutive promoter is particularly useful in the methods. Preferably the constitutive promoter is an ubiquitous constitutive promoter of medium strength. See the “Definitions” section herein for definitions of the various promoter types.

[0167] The constitutive promoter is preferably a medium strength promoter. More preferably it is a plant derived promoter, e.g. a promoter of plant chromosomal origin, such as a GOS2 promoter or a promoter of substantially the same strength and having substantially the same expression pattern (a functionally equivalent promoter), more preferably the promoter is the GOS2 promoter from rice. Further preferably the constitutive promoter is represented by a nucleic acid sequence substantially similar to SEQ ID NO: 306, or SEQ ID NO: 545, most preferably the constitutive promoter is as represented by SEQ ID NO: 306, or SEQ ID NO: 545. See the “Definitions” section herein for further examples of constitutive promoters.

[0168] Concerning WAK-like polypeptides, it should be clear that the applicability of the present invention is not restricted to the WAK-like polypeptide-encoding nucleic acid represented by SEQ ID NO: 1 or 3, nor is the applicability of the invention restricted to expression of a WAK-like polypeptide-encoding nucleic acid when driven by a constitutive promoter.

[0169] Concerning UPA20-like polyeptides, it should be clear that the applicability of the present invention is not restricted to the UPA20-like polypeptide-encoding nucleic acid represented by SEQ ID NO: 406, nor is the applicability of the invention restricted to expression of a UPA20-like polypeptide-encoding nucleic acid when driven by a constitutive promoter. According to another embodiment of the invention, the nucleic acid encoding a UPA20-like polypeptide can operably linked to a root-specific promoter. Examples of other root-specific promoters which may also be used to perform the methods of the invention are shown in Table 2b in the “Definitions” section above. According to yet another embodiment, to another embodiment of the invention, the nucleic acid encoding a UPA20-like polypeptide can operably linked to a seed specific promoter. For instance, the seed specific promoter is an endosperm/aleurone/embryo specific promoter. Examples of endosperm/aleurone/embryo specific promoters are given in Table 2 of the definitions section.

[0170] Concerning WAK-like polypeptides, optionally, one or more terminator sequences may be used in the construct introduced into a plant. Preferably, the construct comprises an expression cassette comprising a GOS2 promoter, substantially similar to SEQ ID NO: 306, operably linked to the nucleic acid encoding the WAK-like polypeptide. More preferably, the construct comprises a zein terminator (t-zein) linked to the 3′ end of the WAK-like coding sequence. Most preferably, the expression cassette comprises a sequence having in increasing order of preference at least 95%, at least 96%, at least 97%, at least 98%, at least 99% identity to the sequence represented by any of the SEQ ID NO: 303, 304 or 305 (pPRO::WAK-like::t-zein sequence). Furthermore, one or more sequences encoding selectable markers may be present on the construct introduced into a plant.

[0171] Concerning UPA20-like polyeptides, optionally, one or more terminator sequences may be used in the construct introduced into a plant. Preferably, the construct comprises an expression cassette comprising a GOS2 promoter, substantially similar to SEQ ID NO: 545, operably linked to the nucleic acid encoding the UPA20-like polypeptide. More preferably, the construct comprises a zein terminator (t-zein) linked to the 3′ end of the UPA20-like coding sequence. Most preferably, the expression cassette comprises a sequence having in increasing order of preference at least 95%, at least 96%, at least 97%, at least 98%, at least 99% identity to the sequence represented by SEQ ID NO: 546 (pGOS2::UPA20-like::t-zein sequence-expression vector 1). Furthermore, one or more sequences encoding selectable markers may be present on the construct introduced into a plant.

[0172] In another embodiment, the construct comprises an expression cassette comprising a GOS2 promoter, substantially similar to SEQ ID NO: 545, operably linked to the nucleic acid encoding the UPA20-like polypeptide. More preferably, the construct comprises a zein terminator (t-zein) linked to the 3′ end of the UPA20-like coding sequence. Most preferably, the expression cassette comprises a sequence having in increasing order of preference at least 95%, at least 96%, at least 97%, at least 98%, at least 99% identity to the sequence represented by SEQ ID NO: 547 (pGOS2::UPA20-like::tzein sequence-expression vector 2). Furthermore, one or more sequences encoding selectable markers may be present on the construct introduced into a plant.

[0173] According to a preferred feature of the invention, the modulated expression is increased expression. Methods for increasing expression of nucleic acids or genes, or gene products, are well documented in the art and examples are provided in the definitions section.

[0174] As mentioned above, a preferred method for modulating expression of a nucleic acid encoding a WAK-like polypeptide, or a UPA20-like polypeptide, is by introducing and expressing in a plant a nucleic acid encoding a WAK-like polypeptide, or a UPA20-like polypeptide; however the effects of performing the method, i.e. enhancing yield-related traits may also be achieved using other well known techniques, including but not limited to T-DNA activation tagging, TILLING, homologous recombination. A description of these techniques is provided in the definitions section.

[0175] The invention also provides a method for the production of transgenic plants having enhanced yield-related traits relative to control plants, comprising introduction and expression in a plant of any nucleic acid encoding a WAK-like polypeptide, or a UPA20-like polypeptide, as defined herein.

[0176] More specifically, the present invention provides a method for the production of transgenic plants having enhanced yield-related traits, particularly increased seed yield and/or yield, which method comprises:
[0177] (i) introducing and expressing in a plant or plant cell a nucleic acid encoding a WAK-like polypeptide, or a UPA20-like polypeptide, or a genetic construct comprising a nucleic acid encoding a WAK-like polypeptide, or a UPA20-like polypeptide; and
[0178] (ii) cultivating the plant cell under conditions promoting plant growth and development.

[0179] The nucleic acid of (i) may be any of the nucleic acids capable of encoding a WAK-like polypeptide, or a UPA20-like polypeptide, as defined herein.

[0180] Cultivating the plant cell under conditions promoting plant growth and development, may or may not include regeneration and/or growth to maturity. Accordingly, in a particular embodiment of the invention, the plant cell transformed by the method according to the invention is regenerable into a transformed plant. In another particular embodiment, the plant cell transformed by the method according to the invention is not regenerable into a transformed plant, i.e. cells that are not capable to regenerate into a plant using cell culture techniques known in the art. While plants cells generally have the characteristic of totipotency, some plant cells can not be used to regenerate or propagate intact plants from said cells. In one embodiment of the invention the plant cells of the invention are such cells. In another embodiment the plant cells of the invention are plant cells that do not sustain themselves in an autotrophic way.

[0181] The nucleic acid may be introduced directly into a plant cell or into the plant itself (including introduction into a tissue, organ or any other part of a plant). According to a preferred feature of the present invention, the nucleic acid is preferably introduced into a plant or plant cell by transformation. The term “transformation” is described in more detail in the “definitions” section herein.

[0182] In one embodiment the present invention extends to any plant cell or plant produced by any of the methods described herein, and to all plant parts and propagules thereof.

[0183] In another embodiment, the plant cells of the invention are plant cells that do not sustain themselves in an autotrophic way, such plant cells are not deemed to represent a plant variety. In a further embodiment the plant cells of the invention are non-plant variety and non-propagative.

[0184] The present invention encompasses plants or parts thereof (including seeds) obtainable by the methods according to the present invention. The plants or plant parts or plant cells comprise a nucleic acid transgene encoding a WAK-like polypeptide, or a UPA20-like polypeptide, as defined above, preferably in a genetic construct such as an expression cassette. The present invention extends further to encompass the progeny of a primary transformed or transfected cell, tissue, organ or whole plant that has been produced by any of the aforementioned methods, the only requirement being that progeny exhibit the same genotypic and/or phenotypic characteristic(s) as those produced by the parent in the methods according to the invention.

[0185] In a further embodiment the invention extends to seeds comprising the expression cassettes of the invention, the genetic constructs of the invention, or the nucleic acids encoding the WAK-like polypeptide, or the UPA20-like polypeptide, and/or the a WAK-like polypeptides, or the UPA20-like polypeptides, as described above.

[0186] The invention also includes host cells containing an isolated nucleic acid encoding a WAK-like polypeptide, or a UPA20-like polypeptide, as defined above. In one embodiment host cells according to the invention are plant cells, yeasts, bacteria or fungi. Host plants for the nucleic acids, construct, expression cassette or the vector used in the method according to the invention are, in principle, advantageously all plants which are capable of synthesizing the polypeptides used in the inventive method. In a particular embodiment the plant cells of the invention overexpress the nucleic acid molecule of the invention.

[0187] The methods of the invention are advantageously applicable to any plant, in particular to any plant as defined herein. Plants that are particularly useful in the methods of the invention include all plants which belong to the superfamily Viridiplantae, in particular monocotyledonous and dicotyledonous plants including fodder or forage legumes, ornamental plants, food crops, trees or shrubs. According to an embodiment of the present invention, the plant is a crop plant. Examples of crop plants include but are not limited to chicory, carrot, cassava, trefoil, soybean, beet, sugar beet, sunflower, canola, alfalfa, rapeseed, linseed, cotton, tomato, potato and tobacco. According to another embodiment of the present invention, the plant is a monocotyledonous plant. Examples of monocotyledonous plants include sugarcane. According to another embodiment of the present invention, the plant is a cereal. Examples of cereals include rice, maize, wheat, barley, millet, rye, triticale, sorghum, emmer, spelt, einkorn, teff, milo and oats. In a particular embodiment the plants used in the methods of the invention are selected from the group consisting of maize, wheat, rice, soybean, cotton, oilseed rape including canola, sugarcane, sugar beet and alfalfa. Advantageously the methods of the invention are more efficient than the known methods, because the plants of the invention have increased yield and/or tolerance to an environmental stress compared to control plants used in comparable methods.

[0188] The invention also extends to harvestable parts of a plant such as, but not limited to seeds, leaves, fruits, flowers, stems, roots, rhizomes, tubers and bulbs, which harvestable parts comprise a recombinant nucleic acid encoding a WAK-like polypeptide, or a UPA20-like polypeptide. The invention furthermore relates to products derived or produced, preferably directly derived or produced, from a harvestable part of such a plant, such as dry pellets, meal or powders, oil, fat and fatty acids, starch or proteins.

[0189] The invention also includes methods for manufacturing a product comprising a) growing the plants of the invention and b) producing said product from or by the plants of the invention or parts thereof, including seeds. In a further embodiment the methods comprise the steps of a) growing the plants of the invention, b) removing the harvestable parts as described herein from the plants and c) producing said product from, or with the harvestable parts of plants according to the invention.

[0190] In one embodiment the products produced by the methods of the invention are plant products such as, but not limited to, a foodstuff, feedstuff, a food supplement, feed supplement, fiber, cosmetic or pharmaceutical. In another embodiment the methods for production are used to make agricultural products such as, but not limited to, plant extracts, proteins, amino acids, carbohydrates, fats, oils, polymers, vitamins, and the like.

[0191] In yet another embodiment the polynucleotides or the polypeptides of the invention are comprised in an agricultural product. In a particular embodiment the nucleic acid sequences and protein sequences of the invention may be used as product markers, for example where an agricultural product was produced by the methods of the invention. Such a marker can be used to identify a product to have been produced by an advantageous process resulting not only in a greater efficiency of the process but also improved quality of the product due to increased quality of the plant material and harvestable parts used in the process. Such markers can be detected by a variety of methods known in the art, for example but not limited to PCR based methods for nucleic acid detection or antibody based methods for protein detection.

[0192] The present invention also encompasses use of nucleic acids encoding WAK-like polypeptides, or UPA20-like polypeptides, as described herein and use of these the WAK-like polypeptides, or the UPA20-like polypeptides, in enhancing any of the aforementioned yield-related traits in plants. For example, nucleic acids encoding WAK-like polypeptide, or UPA20-like polypeptide, described herein, or the WAK-like polypeptides, or the UPA20-like polypeptides themselves, may find use in breeding programmes in which a DNA marker is identified which may be genetically linked to gene encoding a WAK-like polypeptide, or a UPA20-like polypeptide. The nucleic acids/genes, or the WAK-like polypeptides, or UPA20-like polypeptides, themselves may be used to define a molecular marker. This DNA or protein marker may then be used in breeding programmes to select plants having enhanced yield-related traits as defined herein in the methods of the invention. Furthermore, allelic variants of a nucleic acid/gene encoding a WAK-like polypeptide, or a UPA20-like polypeptide, encoding may find use in marker-assisted breeding programmes. Nucleic acids encoding WAK-like polypeptides, or UPA20-like polypeptides, may also be used as probes for genetically and physically mapping the genes that they are a part of, and as markers for traits linked to those genes. Such information may be useful in plant breeding in order to develop lines with desired phenotypes.

### 2. CDKB-RKA Polypeptides

[0193] The present invention is directed to the use of nucleic acid sequences encoding CDKB-RKA polypeptides as defined herein, for increasing yield, and preferably for increasing seed yield and/or for increasing biomass such as vegetative biomass in plants relative to control plants. The present invention is based on the use of modified forms of B-type cyclin-dependent kinases—herein also named “CDKB-RKA polypeptides” or “CDKB-RKA”—that have reduced kinase activity and preferably that lack kinase activity as compared to wild-type B-type cyclin-dependent kinases (CDKB) and on the use of genes encoding such CDKB-RKA polypeptides.

[0194] Surprisingly, it has now been found that modulating expression in a plant of a nucleic acid encoding a CDKB-RKA as defined herein, preferably by introducing and expressing in said plant of a nucleic acid encoding a CDKB-RKA as defined herein, gives plants having enhanced yield-related traits relative to control plants, in particular increased yield, and more particularly (i) increased vegetative biomass such as increased leaf and/or root biomass, and/or (ii) increased seed yield relative to control plants.

[0195] In particular embodiments, a CDKB-RKA as defined herein does not comprise or consist of a full length CDKB polypeptide as described in WO 2005/024029 or as given in Example 1, Table A2, and in particular does not comprise or consist of a full length CDKB polypeptide as represented by SEQ ID NO: 320.

[0196] According to a first aspect, the present invention provides a method for enhancing yield-related traits in plants relative to control plants, comprising modulating expression in a plant of a nucleic acid encoding a CDKB-RKA as defined herein. A preferred method for modulating, preferably increasing expression of a nucleic acid encoding a CDKB-RKA polypeptide as defined herein is by introducing and expressing a nucleic acid encoding such polypeptide in a plant. Hence, a method for increasing yield in a plant relative to a control plant is provided herein, wherein said method comprises introducing and expressing in said plant a nucleic acid molecule encoding a CDKB-RKA polypeptide as defined herein.

[0197] In another aspect, the present invention provides a method for producing plants having enhanced yield-related traits relative to control plants, wherein said method comprises the steps of modulating expression in said plant of a nucleic acid encoding a CDKB-RKA polypeptide as defined herein and optionally selecting for plants having enhanced yield-related traits. In a preferred embodiment, the present invention provides a method for producing plants having enhanced yield-related traits relative to control plants, wherein said method comprises the steps of introducing and expressing in said plant a nucleic acid molecule encoding a CDKB-RKA polypeptide as defined herein and optionally selecting for plants having enhanced yield-related traits.

[0198] Any reference hereinafter to a “protein useful in the methods of the invention” is taken to mean a CDKB-RKA polypeptide as defined herein. Any reference hereinafter to a “nucleic acid useful in the methods of the invention” is taken to mean a nucleic acid capable of encoding a CDKB-RKA as defined herein. It shall further be noted that the terms “CDKB-RKA” and “CDKB-RKA polypeptide” and “CDKB-RKA protein” are used herein as synonyms.

[0199] The term “CDKB-RKA” as used herein encompasses modified forms of B-type cyclin-dependent kinases (CDKB), wherein said modified forms have at least reduced kinase activity compared to wild-type CDKB proteins. Preferably said CDKB-RKA lacks kinase activity. CDKB polypeptides are well known in the art and have for instance been described in Van Leene et al., 2010, Mol Syst Biol 6, 397; Francis 2007 New Phytol 174(2):261-78; Doonan & Kitsios 2009 Mol Biotechnol 42(1):14-29. Examples of CDKB polypeptides are also shown in Example 1, Table A2.

[0200] More in particular, the term “CDKB-RKA” as used herein encompasses B-type cyclin-dependent kinases (CDKB) that are mutated, which mutants have at least reduced kinase activity compared to wild-type proteins, and preferably lack kinase activity. In an example, term “CDKB-RKA” as used encompasses B-type cyclin-dependent kinases (CDKB) that are mutated in the kinase domain. The term “reduced catalytic kinase activity” as used herein refers to a polypeptide which has reduced catalytic kinase activity as compared to a wild type polypeptide. The term “lacking catalytic kinase activity” as used herein refers to a polypeptide which has no or no detectable catalytic kinase activity as compared to a wild type polypeptide. The terms “catalytic kinase activity” and “kinase activity” are used herein as synonyms. Tools and techniques for detecting or determining catalytic kinase activity are well known in the art. Catalytic kinase activity can for instance be determined by means of a kinase assay, such as the one described in Example 4 of the present specification.

[0201] The term “mutated” in the context of the present invention intends to refer to one or more non-silent mutations, i.e. mutations that modify the amino sequence of the polypeptide as compared to a corresponding unmodified polypeptide. Non-limitative examples of such mutations may for instance include: insertions; deletions; amino acid substitutions; frameshift mutations caused by insertion or deletion of a number of nucleotides in a DNA acid sequence that is not evenly divisible by three, point mutations, nonsense mutations resulting for instance in a premature stop codon or a nonsense codon in the transcribed mRNA, and possibly resulting in a truncated protein product; missense mutations or nonsynonymous mutations which is a type of point mutations where a single nucleotide is changed to cause substitution of a different amino acid; etc. Techniques for inducing mutations such as insertions, substitutions, truncations, deletions, etc. are well known in the art, and will therefore not be described in detail herein.

[0202] The term “CDKB-RKA” as used herein also encompasses truncated forms of CDKB, wherein the truncations are preferably located in the kinase domain. The term “CDKB-RKA” as used herein also encompasses truncated forms of CDKB polypeptides in which no active kinase domain is present. An example thereof is represented by Arabidopsis sequence SEQ ID NO: 318, which is a truncated version of SEQ ID NO: 320. Preferably, a CDKB-RKA polypeptide useful in the methods of the present invention is a truncated form of a CDKB polypeptide with a deletion in the C-terminal half of the polypeptide that reduces, preferably substantially inactivates that kinase activity of the polypeptide. More preferably, a CDKB-RKA polypeptide useful in the methods of the present invention is a truncated form of a CDKB polypeptide with a deletion in the C-terminal half of the polypeptide that comprises or consists of substantially the complete kinase domain of that CDKB polypeptide or a part thereof.

[0203] In a preferred embodiment, a CDKB-RKA polypeptide as provided herein comprise a cyclin binding domain represented by a PPTALRE motif with no mismatches or with a mismatch at position 2 and/or 4 from left to right. Preferably a CDKB-RKA polypeptide as provided herein comprise a cyclin binding domain represented by SEQ ID NO: 403, and more preferably represented by SEQ ID NO: 404. In other words, the present invention relates to the use of a nucleic acid sequence encoding a CDKB-RKA polypeptide that is capable of binding cyclins and hence that has cyclin-binding activity. The PPTALRE motifs with no mismatches or with a mismatch at position 2 and/or 4 from left to right, of a representative number of B-type CDK polypeptides can be seen on FIG. 3.

[0204] Alternatively or additionally, the present invention relates to the use of a nucleic acid sequence encoding a CDKB-RKA polypeptide that
[0205] (i) has cyclin-binding activity, and
[0206] (ii) has reduced kinase activity and/or lacks kinase activity as defined herein.

[0207] In another embodiment, the present invention relates to the use of a nucleic acid sequence encoding a CDKB-RKA polypeptide that
[0208] (i) has a cyclin-binding domain represented by a PPTALRE motif with no mismatches or with a mismatch at position 2 and/or 4 from left to right, and preferably represented by SEQ ID NO: 403, and more preferably represented by SEQ ID NO: 404, and
[0209] (ii) has a mutated or truncated kinase domain or lacks a kinase domain.

[0210] In yet another embodiment, the present invention relates to the use of a nucleic acid sequence encoding a CDKB-RKA polypeptide that
[0211] (i) has a cyclin-binding domain represented by a PPTALRE motif with no mismatches or with a mismatch at position 2 and/or 4 from left to right, and preferably represented by SEQ ID NO: 403, and more preferably represented by SEQ ID NO: 404, and
[0212] (ii) has a mutated or truncated kinase domain or that lacks a kinase domain, and
[0213] (iii) has at least about 30-40%, preferably at least about 41-50%, more preferably at least about 51-60%, 61-70%, 71-80%, 81-85%, 86-90%, 91-95%, 96-99% or more than 99% overall sequence identity to SEQ ID NO: 318.

[0214] In another embodiment, a CDKB-RKA polypeptide as provided herein comprises a protein kinase inhibitory domain. In a preferred embodiment, said protein kinase inhibitory domain has a protein kinase inhibitory function, and it is able to be phosphorylated by a kinase, such as by a Wee1 Kinase, to inhibit catalytic kinase activity.

[0215] In yet another embodiment, a CDKB-RKA polypeptide as provided herein lacks a T-loop activation kinase domain (as defined by Magyar et al. 1997; plant cell 9(2) 223-235).

[0216] Nucleic acids encoding a CDKB-RKA polypeptide as defined herein can be derived from any one of the CDKB nucleic acid sequences as given in Table A2 of the Examples section herein. Nucleic acids derived from nucleic acid sequences as given in Table A2 of the Examples section herein are useful in performing the methods of the invention. The amino acid sequences given in Table A2 of the Examples section are example sequences of orthologues and paralogues of a CDKB polypeptide represented by SEQ ID NO: 320, the terms “orthologues” and “paralogues” being as defined herein. Further orthologues and paralogues may readily be identified by performing a so-called reciprocal blast search as described in the definitions section; where the query sequence is SEQ ID NO: 319 or SEQ ID NO: 320, the second BLAST (back-BLAST) would be against Arabidopsis sequences. In addition, in another embodiment, a nucleic acid sequence encoding a CDKB polypeptide as defined herein can also be derived from an orthologue or paralogue of any of the polypeptides given in Table A2. Other examples of nucleic acids encoding CDKB polypeptides from which nucleic acid sequences encoding CDKB-RKA polypeptides as defined herein can be derived are also disclosed for instance in WO 2005/024029 or US20070214517, which are incorporated herein by reference.

[0217] In a preferred example, a CDKB-RKA polypeptide useful in the methods of the present invention is a modified form such as a mutated form and/or a truncated form, of any of the CDKB polypeptides as represented in Table A2, and preferably as represented by SEQ ID NO: 320.

[0218] In another preferred example, a CDKB-RKA polypeptide useful in the methods of the present invention is a truncated form of any of the CDKB polypeptides as represented in Table A2, and preferably as represented by SEQ ID NO: 320, with a deletion in the C-terminal half of said polypeptide that reduces, preferably substantially inactivates that kinase activity of the polypeptide.

[0219] In yet another preferred example a CDKB-RKA polypeptide useful in the methods of the present invention is a truncated form of any of the CDKB polypeptides as represented in Table A2, and preferably as represented by SEQ ID NO: 320, with a deletion that consists of a part of or substantially the complete kinase domain of any of said polypeptides. For instance, a CDKB-RKA polypeptide useful in the methods of the present invention is a truncated form of the CDKB polypeptide as represented by SEQ ID NO: 320, with a deletion of substantially the complete kinase domain of said polypeptide, for instance as represented by the amino acid coordinates 140 to 152 on SEQ ID NO: 4 (IPRO08271), or of only a part thereof, wherein said part may comprise 1, 2, 3, 4, 5, 6, 7, 8, 9, 10, 11, or 12 amino acids.

[0220] In a particularly preferred embodiment, a CDKB-RKA polypeptide useful in the methods of the present invention corresponds to an amino acid sequence represented by SEQ ID NO: 318 or a homologous, orthologous or paralogous sequence thereof.

[0221] The term “homologue of SEQ ID NO: 318” as defined herein refers to an amino acid sequence that has in increasing order of preference at least 30%, 31%, 32%, 33%, 34%, 35%, 36%, 37%, 38%, 39%, 40%, 41%, 42%, 43%, 44%, 45%, 46%, 47%, 48%, 49%, 50%, 51%, 52%, 53%, 54%, 55%, 56%, 57%, 58%, 59%, 60%, 61%, 62%, 63%, 64%, 65%, 66%, 67%, 68%, 69%, 70%, 71%, 72%, 73%, 74%, 75%, 76%, 77%, 78%, 79%, 80%, 81%, 82%, 83%, 84%, 85%, 86%, 87%, 88%, 89%, 90%, 91%, 92%, 93%, 94%, 95%, 96%, 97%, 98%, or 99% overall sequence identity to SEQ ID NO: 318, and for instance has at least about 30-40%, preferably at least about 41-50%, more preferably at least about 51-60%, 61-70%, 71-80%, 81-85%, 86-90%, 91-95%, 96-99% or more than 99% overall sequence identity to SEQ ID NO: 318, provided that the amino acid sequence has
[0222] (i) reduced catalytic kinase activity, and preferably lacks catalytic kinase activity, as defined above, and
[0223] (ii) optionally a cyclin binding domain represented by a PPTALRE motif with no mismatches or with a mismatch at position 2 and/or 4 from left to right, and preferably represented by SEQ ID NO: 403, and more preferably represented by SEQ ID NO: 404.

[0224] The overall sequence identity can be determined using a global alignment algorithm, such as the Needleman Wunsch algorithm in the program GAP (GCG Wisconsin Package, Accelrys), preferably with default parameters and preferably with sequences of mature proteins (i.e. without taking into account secretion signals or transit peptides). In one embodiment the sequence identity level is determined by comparison of the polypeptide sequences over the entire length of the sequence of SEQ ID NO: 318.

[0225] In one embodiment of the present invention the function of the nucleic acid sequences according to the invention is to confer information for synthesis of the CDKB-RKA polypeptides having reduced, and preferably lacking catalytic kinase activity and that increase yield or yield-related traits, when such a nucleic acid sequence of the invention is transcribed and translated in a living plant cell.

[0226] Nucleic acids encoding CDKB-RKA polypeptides as defined herein may be derived from any natural or artificial source. The nucleic acid may be modified from its native form in composition and/or genomic environment through deliberate human manipulation. Preferably the CDKB-RKA polypeptide-encoding nucleic acid is from a plant, further preferably from a dicotyledonous plant, more preferably from the family Brassicaceae, most preferably the nucleic acid is from Arabidopsis thaliana.

[0227] In addition, CDKB-RKA polypeptides as defined herein, when expressed in rice according to the methods of the present invention as outlined in Examples 8 and 9, give plants having increased yield related traits, in particular any one or more aboveground biomass, root biomass, and seed yield including total weight of seeds and number of seeds.

[0228] The present invention is illustrated by transforming plants with the nucleic acid sequence represented by SEQ ID NO: 317, encoding the polypeptide sequence of SEQ ID NO: 318. However, performance of the invention is not restricted to these sequences; the methods of the invention may advantageously be performed using any CDKB-RKA-encoding nucleic acid or CDKB-RKA polypeptide or variants thereof as defined herein.

[0229] Nucleic acid variants may also be useful in practicing the methods of the invention. Examples of such nucleic acid variants include nucleic acids encoding homologues and derivatives of any one of the amino acid sequences given in Table A2 of the Examples section or of SEQ ID NO: 318, the terms “homologue” and “derivative” being as defined herein, provided that said homologues and derivatives have reduced, and preferably lack catalytic kinase activity. Also useful in the methods of the invention are nucleic acids encoding homologues and derivatives of orthologues or paralogues of any one of the amino acid sequences given in Table A2 of the Examples section or of SEQ ID NO: 318, provided that said homologues and derivatives of orthologues or paralogues have reduced, and preferably lack catalytic kinase activity as defined above. Further variants useful in practicing the methods of the invention are variants in which codon usage is optimised or in which miRNA target sites are removed.

[0230] Further nucleic acid variants useful in practicing the methods of the invention include portions of nucleic acids encoding CDKB-RKA polypeptides, nucleic acids hybridising to nucleic acids encoding CDKB-RKA polypeptides, splice variants of nucleic acids encoding CDKB-RKA polypeptides, allelic variants of nucleic acids encoding CDKB-RKA polypeptides and variants of nucleic acids encoding CDKB-RKA polypeptides obtained by gene shuffling. The terms hybridising sequence, splice variant, allelic variant and gene shuffling are as described herein. These further nucleic acid variants according to the invention are all characterized in that they encode polypeptides that have reduced, and preferably lack catalytic kinase activity.

[0231] According to the present invention, there is provided a method for enhancing yield-related traits in plants, comprising introducing and expressing in a plant a portion of any one of the nucleic acid sequences given in Table A2 of the Examples section or of SEQ ID NO: 317, or a portion of a nucleic acid encoding an orthologue, paralogue or homologue of any of the amino acid sequences given in Table A2 of the Examples section or of SEQ ID NO: 317.

[0232] A portion of a nucleic acid may be prepared, for example, by making one or more deletions to the nucleic acid. The portions may be used in isolated form or they may be fused to other coding (or non-coding) sequences in order to, for example, produce a protein that combines several activities. When fused to other coding sequences, the resultant polypeptide produced upon translation may be bigger than that predicted for the protein portion.

[0233] Portions useful in the methods of the invention, encode a CDKB-RKA polypeptide as defined herein. Preferably, the portion is a portion of any one of the nucleic acids given in Table A2 of the Examples section or of SEQ ID NO: 317, or is a portion of a nucleic acid encoding an orthologue or paralogue of any one of the amino acid sequences given in Table A2 of the Examples section or of SEQ ID NO: 318. Preferably the portion is at least 50, 60, 70, 80, 90, 100, 110, 120, 150, 200, 250, 300, 350, 400, 450, 500, 550, 600, 650, 700 consecutive nucleotides in length, the consecutive nucleotides being of any one of the nucleic acid sequences given in Table A2 of the Examples section or of SEQ ID NO: 317, or of a nucleic acid encoding an orthologue or paralogue of any one of the amino acid sequences given in Table A2 of the Examples section or of SEQ ID NO: 317. Preferably, the portion encodes a fragment of an amino acid sequence which has reduced, and preferably lacks kinase activity, and which (i) comprises a cyclin binding domain and/or (ii) has at least about 30-40%, preferably at least about 41-50%, more preferably at least about 51-60%, 61-70%, 71-80%, 81-85%, 86-90%, 91-95%, 96-99% or more than 99% overall sequence identity to SEQ ID NO: 318.

[0234] Another nucleic acid variant useful in the methods of the invention is a nucleic acid capable of hybridising, under reduced stringency conditions, preferably under stringent conditions, with a nucleic acid encoding a CDKB-RKA polypeptide as defined herein, or with a portion as defined herein.

[0235] According to the present invention, there is provided a method for enhancing yield-related traits in plants, comprising introducing and expressing in a plant a nucleic acid capable of hybridizing to any one of the nucleic acids given in Table A2 of the Examples section or to SEQ ID NO: 317 to a portion as defined herein, or comprising introducing and expressing in a plant a nucleic acid capable of hybridising to a nucleic acid encoding an orthologue, paralogue or homologue of any of the nucleic acid sequences given in Table A2 of the Examples section or to SEQ ID NO: 317 or to a portion as defined herein.

[0236] Hybridising sequences useful in the methods of the invention encode a CDKB-RKA polypeptide as defined herein. Preferably, the hybridising sequence is capable of hybridising to the complement of any one of the nucleic acids given in Table A2 of the Examples section, or to SEQ ID NO: 317, or to a portion of any of these sequences, a portion being as defined above, or the hybridising sequence is capable of hybridising to the complement of a nucleic acid encoding an orthologue or paralogue of any one of the amino acid sequences given in Table A2 of the Examples section or of SEQ ID NO: 317.

[0237] Most preferably, the hybridising sequence is capable of hybridising to the complement of a nucleic acid as represented by SEQ ID NO: 317 or to a portion thereof. In one embodiment, the hybridization conditions are of medium stringency, preferably of high stringency, as defined above.

[0238] Preferably, the hybridising sequence encodes a polypeptide with an amino acid sequence which has reduced, and preferably lacks kinase activity, and which (i) comprises a cyclin binding domain and/or (ii) has at least about 30-40%, preferably at least about 41-50%, more preferably at least about 51-60%, 61-70%, 71-80%, 81-85%, 86-90%, 91-95%, 96-99% or more than 99% overall sequence identity to SEQ ID NO: 318.

[0239] Another nucleic acid variant useful in the methods of the invention is a splice variant encoding a CDKB-RKA polypeptide as defined hereinabove, a splice variant being as defined herein.

[0240] According to the present invention, there is provided a method for enhancing yield-related traits in plants, comprising introducing and expressing in a plant a splice variant of any one of the nucleic acid sequences given in Table A2 of the Examples section or of SEQ ID NO: 317, or a splice variant of a nucleic acid encoding an orthologue, paralogue or homologue of any of the amino acid sequences given in Table A2 of the Examples section or of SEQ ID NO: 317.

[0241] Preferred splice variants are splice variants of a nucleic acid represented by SEQ ID NO: 317, or a splice variant of a nucleic acid encoding an orthologue or paralogue of SEQ ID NO: 318. Preferably, the amino acid sequence encoded by the splice variant has reduced, and preferably lacks kinase activity, and (i) comprises a cyclin binding domain and/or (ii) has at least about 30-40%, preferably at least about 41-50%, more preferably at least about 51-60%, 61-70%, 71-80%, 81-85%, 86-90%, 91-95%, 96-99% or more than 99% overall sequence identity to SEQ ID NO: 318.

[0242] Another nucleic acid variant useful in performing the methods of the invention is an allelic variant of a nucleic acid encoding a CDKB-RKA polypeptide as defined hereinabove, an allelic variant being as defined herein.

[0243] According to the present invention, there is provided a method for enhancing yield-related traits in plants, comprising introducing and expressing in a plant an allelic variant of any one of the nucleic acids given in Table A2 of the Examples section or of SEQ ID NO: 317, or comprising introducing and expressing in a plant an allelic variant of a nucleic acid encoding an orthologue, paralogue or homologue of any of the amino acid sequences given in Table A2 of the Examples section or of SEQ ID NO: 317.

[0244] Allelic variants exist in nature, and encompassed within the methods of the present invention is the use of these natural alleles. Preferably, the allelic variant is an allelic variant of SEQ ID NO: 317 or an allelic variant of a nucleic acid encoding an orthologue or paralogue of SEQ ID NO: 318. Preferably, the amino acid sequence encoded by the allelic variant, has reduced, and preferably lacks kinase activity, and (i) comprises a cyclin binding domain and/or (ii) has at least about 30-40%, preferably at least about 41-50%, more preferably at least about 51-60%, 61-70%, 71-80%, 81-85%, 86-90%, 91-95%, 96-99% or more than 99% overall sequence identity to SEQ ID NO: 318.

[0245] Gene shuffling or directed evolution may also be used to generate variants of nucleic acids encoding CDKB-RKA polypeptides as defined above; the term “gene shuffling” being as defined herein.

[0246] According to the present invention, there is provided a method for enhancing yield-related traits in plants, comprising introducing and expressing in a plant a variant of any one of the nucleic acid sequences given in Table A2 of the Examples section or of SEQ ID NO: 317, or comprising introducing and expressing in a plant a variant of a nucleic acid encoding an orthologue, paralogue or homologue of any of the amino acid sequences given in Table A2 of the Examples section or of SEQ ID NO: 317, which variant nucleic acid is obtained by gene shuffling.

[0247] Preferably, the amino acid sequence encoded by the variant nucleic acid obtained by gene shuffling, has reduced, and preferably lacks kinase activity, and (i) comprises a cyclin binding domain and/or (ii) has at least about 30-40%, preferably at least about 41-50%, more preferably at least about 51-60%, 61-70%, 71-80%, 81-85%, 86-90%, 91-95%, 96-99% or more than 99% overall sequence identity to SEQ ID NO: 318.

[0248] Furthermore, nucleic acid variants may also be obtained by site-directed mutagenesis. Several methods are available to achieve site-directed mutagenesis, the most common being PCR based methods (Current Protocols in Molecular Biology. Wiley Eds.). CDKB-RKA polypeptides differing from the sequence of SEQ ID NO: 318 by one or several amino acids (substitution(s), insertion(s) and/or deletion(s) as defined above) may equally be useful to increase the yield of plants in the methods and constructs and plants of the invention.

[0249] In another embodiment the present invention extends to recombinant chromosomal DNA comprising a nucleic acid sequence useful in the methods of the invention, wherein said nucleic acid is present in the chromosomal DNA as a result of recombinant methods, i.e. said nucleic acid is not in the chromosomal DNA in its natural genetic environment. In a further embodiment the recombinant chromosomal DNA of the invention is comprised in a plant cell.

[0250] Performance of the methods of the invention gives plants having enhanced yield-related traits. In particular performance of the methods of the invention gives plants having increased yield, especially increased seed yield relative to control plants. The terms “yield” and “seed yield” are described in more detail in the “definitions” section herein. In another embodiment, performance of the methods of the invention gives plants having increased yield, especially increased vegetative biomass, such as increased leaf and/or root biomass relative to control plants. The terms “vegetative biomass” is described in more detail in the “definitions” section herein.

[0251] Reference herein to enhanced yield-related traits is taken to mean an increase in early vigour and/or in biomass (weight) of one or more parts of a plant, which may include (i) aboveground parts and preferably aboveground harvestable parts and/or (ii) parts below ground and preferably harvestable below ground. In particular, such harvestable parts are seeds, and performance of the methods of the invention results in plants having increased seed yield relative to the seed yield of control plants.

[0252] The present invention provides a method for increasing yield-related traits, and preferably yield, and more preferably seed yield and biomass, especially increased vegetative biomass, such as increased leaf and/or root biomass, relative to control plants, which method comprises modulating expression in a plant of a nucleic acid encoding a CDKB-RKA polypeptide as defined herein.

[0253] According to a preferred feature of the present invention, performance of the methods of the invention gives plants having an increased growth rate relative to control plants. Therefore, according to the present invention, there is provided a method for increasing the growth rate of plants, which method comprises modulating expression in a plant of a nucleic acid encoding a CDKB-RKA polypeptide as defined herein.

[0254] Performance of the methods of the invention gives plants grown under non-stress conditions or under mild drought conditions increased yield relative to control plants grown under comparable conditions. Therefore, according to the present invention, there is provided a method for increasing yield in plants grown under non-stress conditions or under mild drought conditions, which method comprises modulating expression in a plant of a nucleic acid encoding a CDKB-RKA polypeptide as defined herein.

[0255] Performance of the methods of the invention gives plants grown under conditions of drought, increased yield relative to control plants grown under comparable conditions. Therefore, according to the present invention, there is provided a method for increasing yield in plants grown under conditions of drought which method comprises modulating expression in a plant of a nucleic acid encoding a CDKB-RKA polypeptide as defined herein.

[0256] Performance of the methods of the invention gives plants grown under conditions of nutrient deficiency, particularly under conditions of nitrogen deficiency, increased yield relative to control plants grown under comparable conditions. Therefore, according to the present invention, there is provided a method for increasing yield in plants grown under conditions of nutrient deficiency, which method comprises modulating expression in a plant of a nucleic acid encoding a CDKB-RKA polypeptide as defined herein.

[0257] Performance of the methods of the invention gives plants grown under conditions of salt stress, increased yield relative to control plants grown under comparable conditions. Therefore, according to the present invention, there is provided a method for increasing yield in plants grown under conditions of salt stress, which method comprises modulating expression in a plant of a nucleic acid encoding a CDKB-RKA polypeptide as defined herein.

[0258] The invention also provides genetic constructs and vectors to facilitate introduction and/or expression in plants of nucleic acids encoding CDKB-RKA polypeptides as defined herein. The gene constructs may be inserted into vectors, which may be commercially available, suitable for transforming into plants and suitable for expression of the gene of interest in the transformed cells. The invention also provides use of a gene construct as defined herein in the methods of the invention.

[0259] More specifically, the present invention provides a construct comprising:
[0260] (a) a nucleic acid encoding a CDKB-RKA polypeptide as defined above;
[0261] (b) one or more control sequences capable of driving expression of the nucleic acid sequence of (a); and optionally
[0262] (c) a transcription termination sequence.

[0263] Preferably, the nucleic acid encoding a CDKB-RKA polypeptide is as defined above. The term “control sequence” and “termination sequence” are as defined herein.

[0264] The genetic construct of the invention may be comprised in a host cell, plant cell, seed, agricultural product or plant. The invention furthermore provides plants transformed with a construct as described above. In particular, the invention provides plants transformed with a construct as described above, which plants have increased yield-related traits as described herein.

[0265] Plants are transformed with a genetic construct such as a vector or an expression cassette comprising any of the nucleic acids described above. The skilled artisan is well aware of the genetic elements that must be present on the genetic construct in order to successfully transform, select and propagate host cells containing the sequence of interest. The sequence of interest is operably linked to one or more control sequences (at least to a promoter).

[0266] In one embodiment the genetic construct of the invention confers increased yield or yield related traits(s) to a living plant cell when it has been introduced into said plant cell and express the nucleic acid encoding the CDKB-RKA polypeptide, comprised in the genetic construct.

[0267] It should be clear that the applicability of the present invention is not restricted to the CDKB-RKA polypeptide-encoding nucleic acid represented by SEQ ID NO: 317.

[0268] Advantageously, any type of promoter, whether natural or synthetic, may be used to drive expression of the nucleic acid sequence, but preferably the promoter is of plant origin. A constitutive promoter is particularly useful in the methods. Preferably the constitutive promoter is a medium strength promoter. In another embodiment said constitutive promoter is an ubiquitous constitutive promoter of medium strength. See the “Definitions” section herein for definitions of the various promoter types.

[0269] Optionally, one or more terminator sequences may be used in the construct introduced into a plant. Preferably, the construct comprises an expression cassette comprising a medium strength constitutive promoter, operably linked to the nucleic acid encoding the CDKB-RKA polypeptide as defined herein. Furthermore, one or more sequences encoding selectable markers may be present on the construct introduced into a plant.

[0270] According to a preferred feature of the invention, the modulated expression is increased expression. Methods for increasing expression of nucleic acids or genes, or gene products, are well documented in the art and examples are provided in the definitions section.

[0271] As mentioned above, a preferred method for modulating expression of a nucleic acid encoding a CDKB-RKA polypeptide as defined herein is by introducing and expressing in a plant a nucleic acid encoding a CDKB-RKA polypeptide; however the effects of performing the method, i.e. enhancing yield-related traits may also be achieved using other well known techniques, including but not limited to T-DNA activation tagging, TILLING, homologous recombination. A description of these techniques is provided in the definitions section.

[0272] The invention also provides a method for the production of transgenic plants having enhanced yield-related traits relative to control plants, comprising introduction and expression in a plant of any nucleic acid encoding a CDKB-RKA polypeptide as defined herein.

[0273] More specifically, the present invention provides a method for the production of transgenic plants having enhanced yield-related traits, particularly increased yield, more particularly increased seed yield and/or increased biomass such as increased vegetative biomass, which method comprises:
[0274] (i) introducing and expressing in a plant or plant cell a CDKB-RKA polypeptide-encoding nucleic acid as defined herein or a genetic construct comprising a CDKB-RKA polypeptide-encoding nucleic acid as defined herein; and
[0275] (ii) cultivating the plant cell under conditions promoting plant growth and development.

[0276] Cultivating the plant cell under conditions promoting plant growth and development, may or may not include regeneration and or growth to maturity.

[0277] The nucleic acid of (i) may be any of the nucleic acids capable of encoding a CDKB-RKA polypeptide as defined herein.

[0278] The nucleic acid may be introduced directly into a plant cell or into the plant itself (including introduction into a tissue, organ or any other part of a plant). According to a preferred feature of the present invention, the nucleic acid is preferably introduced into a plant by transformation. The term “transformation” is described in more detail in the “definitions” section herein.

[0279] In one embodiment the present invention extends to any plant cell or plant produced by any of the methods described herein, and to all plant parts and propagules thereof. The present invention encompasses plants or parts thereof (including seeds) obtainable by the methods according to the present invention. The plants or plant parts or plant cells comprise a nucleic acid transgene encoding a CDKB-RKA polypeptide as defined above, preferably in a genetic construct such as an expression cassette. The present invention extends further to encompass the progeny of a primary transformed or transfected cell, tissue, organ or whole plant that has been produced by any of the aforementioned methods, the only requirement being that progeny exhibit the same genotypic and/or phenotypic characteristic(s) as those produced by the parent in the methods according to the invention.

[0280] In a further embodiment invention extends to seeds comprising the expression cassettes of the invention, the genetic constructs of the invention, the nucleic acids encoding the CDKB-RKA and/or the CDKB-RKA encoded by the nucleic acids as described above.

[0281] In a particular embodiment the plant cells of the invention are non-propagative cells, i.e. cells that are not capable to regenerate into a plant using cell culture techniques known in the art. While plants cells generally have the characteristic of totipotency, some plant cells can not be used to regenerate or propagate intact plants from said cells. In one embodiment of the invention the plant cells of the invention are such cells.

[0282] In another embodiment the plant cells of the invention are plant cells that do not sustain themselves in an autotrophic way, such plant cells are not deemed to represent a plant variety. In a further embodiment the plant cells of the invention are non-plant variety and non-propagative.

[0283] The invention also includes host cells containing an isolated nucleic acid encoding a CDKB-RKA polypeptide as defined hereinabove. In one embodiment host cells according to the invention are plant cells, yeasts, bacteria or fungi. Host plants for the nucleic acids or the vector used in the method according to the invention, the expression cassette or construct or vector are, in principle, advantageously all plants, which are capable of synthesizing the polypeptides used in the inventive method. In a particular embodiment the plant cells of the invention overexpress the nucleic acid molecule of the invention.

[0284] The invention also includes methods for the production of a product comprising a) growing the plants of the invention and b) producing said product from or by the plants of the invention or parts, including seeds, of these plants. In a further embodiment the methods comprises the steps of a) growing the plants of the invention, b) removing the harvestable parts as defined above from the plants and c) producing said product from, or with the harvestable parts of the invention.

[0285] Advantageously the methods of the invention are more efficient than the known methods, because the plants of the invention have increased yield and/or stress tolerance to an environmental stress compared to a control plant used in comparable methods. In one embodiment the products produced by the methods of the invention are plant products such as, but not limited to, a foodstuff, feedstuff, a food supplement, feed supplement, fiber, cosmetic or pharmaceutical. In another embodiment the inventive methods for the production are used to make agricultural products such as, but not limited to, plant extracts, proteins, amino acids, carbohydrates, fats, oils, polymers, vitamins, and the like.

[0286] In yet another embodiment the polynucleotide sequences or the polypeptide sequences of the invention are comprised in an agricultural product. In a particular embodiment the nucleic acid sequences and protein sequences of the invention may be used as product markers, for example where an agricultural product was produced by the methods of the invention. Such a marker can be used to identify a product to have been produced by an advantageous process resulting not only in a greater efficiency of the process but also improved quality of the product due to increased quality of the plant material and harvestable parts used in the process. Such markers can be detected by a variety of methods known in the art, for example but not limited to PCR based methods for nucleic acid detection or antibody based methods for protein detection.

[0287] The methods of the invention are advantageously applicable to any plant, in particular to any plant as defined herein. Plants that are particularly useful in the methods of the invention include all plants which belong to the superfamily Viridiplantae, in particular monocotyledonous and dicotyledonous plants including fodder or forage legumes, ornamental plants, food crops, trees or shrubs. According to an embodiment of the present invention, the plant is a crop plant. Examples of crop plants include but are not limited to chicory, carrot, cassava, trefoil, soybean, beet, sugar beet, sunflower, canola, alfalfa, rapeseed, linseed, cotton, tomato, potato and tobacco. According to another embodiment of the present invention, the plant is a monocotyledonous plant. Examples of monocotyledonous plants include sugarcane. According to another embodiment of the present invention, the plant is a cereal. Examples of cereals include rice, maize, wheat, barley, millet, rye, triticale, sorghum, emmer, spelt, einkorn, teff, milo and oats. In a particular embodiment the plants used in the methods of the invention are selected from the group consisting of maize, wheat, rice, soybean, cotton, oilseed rape including canola, sugarcane, sugar beet and alfalfa.

[0288] The invention also extends to harvestable parts of a plant such as, but not limited to seeds, leaves, fruits, flowers, stems, roots, rhizomes, tubers and bulbs, which harvestable parts comprise a recombinant nucleic acid encoding a CDKB-RKA polypeptide. The invention furthermore relates to products derived or produced, preferably directly derived or produced, from a harvestable part of such a plant, such as dry pellets or powders, oil, fat and fatty acids, starch or proteins.

[0289] The present invention also encompasses use of nucleic acids encoding CDKB-RKA polypeptides as described herein and use of these CDKB-RKA polypeptides in enhancing any of the aforementioned yield-related traits in plants. For example, nucleic acids encoding CDKB-RKA polypeptide described herein, or the CDKB-RKA polypeptides themselves, may find use in breeding programs in which a DNA marker is identified which may be genetically linked to a CDKB-RKA polypeptide-encoding gene. The nucleic acids/genes, or the CDKB-RKA polypeptides themselves may be used to define a molecular marker. This DNA or protein marker may then be used in breeding programs to select plants having enhanced yield-related traits as defined hereinabove in the methods of the invention. Furthermore, allelic variants of a CDKB-RKA polypeptide-encoding nucleic acid/gene may find use in marker-assisted breeding programs. Nucleic acids encoding CDKB-RKA polypeptides may also be used as probes for genetically and physically mapping the genes that they are a part of, and as markers for traits linked to those genes. Such information may be useful in plant breeding in order to develop lines with desired phenotypes.

### EMBODIMENTS

### 1. WAK-Like Polypeptides

[0290] The present invention is further characterized by one or more of the following embodiments.
[0291] 1. A method for enhancing yield-related traits in plants relative to control plants, comprising modulating expression in a plant of a nucleic acid encoding a WAK-like polypeptide, wherein said WAK-like polypeptide comprises an EGF domain and a transmembrane domain.
[0292] 2. Method according to embodiment 1, wherein said modulated expression is effected by introducing and expressing in a plant said nucleic acid encoding said WAK-like polypeptide.
[0293] 3. Method according to embodiment 1 or 2, wherein said enhanced yield-related traits comprise increased yield relative to control plants, and preferably comprise increased biomass and/or increased seed yield relative to control plants.
[0294] 4. Method according to any one of embodiments 1 to 3, wherein said enhanced yield-related traits are obtained under non-stress conditions.
[0295] 5. Method according to any one of embodiments 1 to 3, wherein said enhanced yield-related traits are obtained under conditions of drought stress or nitrogen deficiency.
[0296] 6. Method according to any one of embodiments 1 to 5, wherein said nucleic acid encoding a WAK-like polypeptide is of plant origin, preferably from a monocotyledonous plant, further preferably from the family Poaceae, more preferably from the genus Oryza, most preferably from Oryza sativa.
[0297] 7. Method according to any one of embodiments 1 to 6, wherein said nucleic acid encoding a WAK-like encodes any one of the polypeptides listed in Table A1 or is a portion of such a nucleic acid, or a nucleic acid capable of hybridising with such a nucleic acid, provided these nucleic acids encode polypeptides comprising an EGF domain and a transmembrane domain.
[0298] 8. Method according to any one of embodiments 1 to 7, wherein said nucleic acid sequence encodes an orthologue or paralogue of any of the polypeptides given in Table A1, provided these nucleic acids encode polypeptides comprising an EGF domain and a transmembrane domain.
[0299] 9. Method according to any one of embodiments 1 to 8, wherein said nucleic acid encodes the polypeptide represented by SEQ ID NO: 2 or 4.
[0300] 10. Method according to any one of embodiments 1 to 9, wherein said nucleic acid is operably linked to a constitutive promoter, preferably to a medium strength constitutive promoter, preferably to a plant promoter, more preferably to a GOS2 promoter, most preferably to a GOS2 promoter from rice.
[0301] 11. Plant, plant part thereof, including seeds, or plant cell, obtainable by a method according to any one of embodiments 1 to 10, wherein said plant, plant part or plant cell comprises a recombinant nucleic acid encoding a WAK-like polypeptide as defined in any of embodiments 1 and 4 to 9.
[0302] 12. Construct comprising:
   [0303] (i) nucleic acid encoding a WAK-like as defined in any of embodiments 1 and 4 to 9;
   [0304] (ii) one or more control sequences capable of driving expression of the nucleic acid sequence of (i); and optionally
   [0305] (i) a transcription termination sequence.
[0306] 13. Construct according to embodiment 12, wherein one of said control sequences is a constitutive promoter, preferably a medium strength constitutive promoter, preferably to a plant promoter, more preferably a GOS2 promoter, most preferably a GOS2 promoter from rice.
[0307] 14. Use of a construct according to embodiment 12 or 13 in a method for making plants having enhanced yield-related traits, preferably increased yield relative to control plants, and more preferably increased seed yield and/or increased biomass relative to control plants.
[0308] 15. Plant, plant part or plant cell transformed with a construct according to embodiment 12 or 13.
[0309] 16. Method for the production of a transgenic plant having enhanced yield-related traits relative to control plants, preferably increased yield relative to control plants, and more preferably increased seed yield and/or increased biomass relative to control plants, comprising:
   [0310] (i) introducing and expressing in a plant cell or plant a nucleic acid encoding a WAK-like polypeptide as defined in any of embodiments 1 and 4 to 9; and
   [0311] (ii) cultivating said plant cell or plant under conditions promoting plant growth and development.
[0312] 17. Transgenic plant having enhanced yield-related traits relative to control plants, preferably increased yield relative to control plants, and more preferably increased seed yield and/or increased biomass, resulting from modulated expression of a nucleic acid encoding a WAK-like polypeptide as defined in any of embodiments 1 and 4 to 9 or a transgenic plant cell derived from said transgenic plant.
[0313] 18. Transgenic plant according to embodiment 11, 15 or 17, or a transgenic plant cell derived therefrom, wherein said plant is a crop plant, such as beet, sugarbeet or alfalfa; or a monocotyledonous plant such as sugarcane; or a cereal, such as rice, maize, wheat, barley, millet, rye, triticale, sorghum, emmer, spelt, einkorn, teff, milo or oats.
[0314] 19. Harvestable parts of a plant according to embodiment 18, wherein said harvestable parts are preferably shoot biomass and/or seeds.
[0315] 20. Products derived from a plant according to embodiment 18 and/or from harvestable parts of a plant according to embodiment 19.
[0316] 21. Use of a nucleic acid encoding a WAK-like polypeptide as defined in any of embodiments 1 and 4 to 9 for enhancing yield-related traits in plants relative to control plants, preferably for increasing yield, and more preferably for increasing seed yield and/or for increasing biomass in plants relative to control plants.
[0317] 22. A method for the production of a product comprising the steps of growing the plants according to embodiment 11, 14, 15, 17 or 18 and producing said product from or by
   [0318] (i) said plants; or
   [0319] (ii) parts, including seeds, of said plants.
[0320] 23. Construct according to embodiment 12 or 13 comprised in a plant cell.
[0321] 24. Recombinant chromosomal DNA comprising the construct according to embodiment 12 or 13.

### 2. CDKB-RKA Polypeptides

[0322] The present invention is characterized by one or more of the following embodiments.
[0323] 1. A method for increasing yield in a plant relative to a control plant, comprising introducing and expressing in said plant a nucleic acid molecule encoding a CDKB-RKA polypeptide, wherein said CDKB-RKA polypeptide is a modified CDKB polypeptide, and wherein said CDKB-RKA polypeptide has reduced catalytic kinase activity, as compared to said CDKB polypeptide.
[0324] 2. Method according to embodiment 1, wherein said CDKB-RKA polypeptide lacks catalytic kinase activity.
[0325] 3. Method according to embodiment 1 or 2, wherein said CDKB-RKA polypeptide is a mutated CDKB polypeptide.
[0326] 4. Method according to embodiment 1, 2 or 3, wherein said CDKB-RKA polypeptide is a CDKB polypeptide comprising a mutated kinase domain.
[0327] 5. Method according to any of embodiments 1 to 4, wherein said CDKB-RKA polypeptide is a truncated CDKB polypeptide.
[0328] 6. Method according to any of embodiments 1 to 5, wherein said CDKB-RKA polypeptide is a truncated CDKB polypeptide comprising a deletion in the C-terminal half of said polypeptide that reduces, and preferably substantially inactivates, that kinase activity of said CDKB.
[0329] 7. Method according to any of embodiments 1 to 6 wherein said CDKB-RKA polypeptide is a truncated CDKB polypeptide comprising a deletion of the kinase domain of said CDKB polypeptide.
[0330] 8. Method according to any of embodiments 1 to 6 wherein said CDKB-RKA polypeptide is a truncated CDKB polypeptide comprising a deletion of a part of the kinase domain of said CDKB polypeptide, wherein said part preferably comprises at least 1, 2, 3, 4, 5, 6, 7, 8, 9, 10, 11 or 12 amino acids.
[0331] 9. Method according to any of embodiments 1 to 8, wherein said kinase domain of said CDKB polypeptide is represented by a conserved domain from amino acid 140 to 152 in SEQ ID NO: 320.
[0332] 10. Method according to any of embodiments 1 to 9 wherein said CDKB polypeptide has cyclin-binding activity.
[0333] 11. Method according to any of embodiments 1 to 10, wherein said CDKB-RKA polypeptide comprises a cyclin binding domain, preferably represented by a PPTALRE motif with no mismatches or with a mismatch at position 2 and/or 4 from left to right, and more preferably represented by SEQ ID NO: 403, and more preferably represented by SEQ ID NO: 404.
[0334] 12. Method according to any of embodiments 1 to 11, wherein said CDKB-RKA polypeptide comprises a protein kinase inhibitory domain.
[0335] 13. Method according to any of embodiments 1 to 12, wherein said CDKB-RKA polypeptide lacks a T-loop activation kinase domain.
[0336] 14. Method according to any one of embodiments 1 to 13, wherein said nucleic acid encoding an CDKB-RKA is selected from any one of
   [0337] a nucleic acid derived from a nucleic acid encoding any one of the polypeptides listed in Table A2;
   [0338] a nucleic acid derived from an orthologue or paralogue of any of the polypeptides given in Table A2;
   [0339] a portion of a nucleic acid encoding any one of the polypeptides listed in Table A2 or of an orthologue or paralogue of any of the polypeptides given in Table A2;
   [0340] a nucleic acid capable of hybridising with a nucleic acid encoding any one of the polypeptides listed in Table A2 or of an orthologue or paralogue of any of the polypeptides given in Table A2.
[0341] 15. Method according to any one of embodiments 1 to 14, wherein said nucleic acid encodes a polypeptide represented by SEQ ID NO: 318 or a homologue, orthologue or paralogue thereof, or a portion of said nucleic acid, or a nucleic acid capable of hybridising with said nucleic acid.
[0342] 16. Method according to any one of embodiments 1 to 15, wherein said nucleic acid encoding said CDKB polypeptide is of plant origin, preferably from a dicotyledonous plant, further preferably from the family Brassicaceae, more preferably from the genus Arabidopsis, most preferably from Arabidopsis thaliana.
[0343] 17. Method according to any one of embodiments 1 to 16, wherein said nucleic acid encodes a polypeptide having has at least about 30-40%, preferably at least about 41-50%, more preferably at least about 51-60%, 61-70%, 71-80%, 81-85%, 86-90%, 91-95%, 96-99% or more than 99% overall sequence identity to SEQ ID NO: 318, and preferably corresponding to SEQ ID NO: 318.
[0344] 18. Method according to any of embodiments 1 to 17, wherein said increased yield relative to control plants comprises (i) increased seed yield and/or (ii) increased vegetative biomass, such as increased leaf biomass and/or increased root biomass.
[0345] 19. Method according to any one of embodiments 1 to 18, wherein said enhanced yield-related traits are obtained under non-stress conditions.
[0346] 20. Method according to any one of embodiments 1 to 19 wherein said nucleic acid is operably linked to a constitutive promoter, preferably to a constitutive plant promoter, more preferably to a medium strength constitutive plant promoter.
[0347] 21. Transgenic plant, transgenic plant part thereof, including seeds, or transgenic plant cell, obtainable by a method according to any one of embodiments 1 to 20, wherein said plant, plant part or plant cell comprises a recombinant nucleic acid encoding a CDKB-RKA polypeptide as defined in any of embodiments 1 and 17.
[0348] 22. Construct comprising:
   [0349] (i) nucleic acid encoding a CDKB-RKA polypeptide as defined in any of embodiments 1 to 17
   [0350] (ii) one or more control sequences capable of driving expression of the nucleic acid sequence of (i); and optionally
   [0351] (iii) a transcription termination sequence.
[0352] 23. Construct according to embodiment 22, wherein one of said control sequences is a constitutive promoter, preferably to a constitutive plant promoter, more preferably to a medium strength constitutive plant promoter.
[0353] 24. Use of a construct according to embodiment 22 or 23 in a method for making plants having enhanced yield-related traits, preferably increased yield relative to control plants, and more preferably increased seed yield and/or increased biomass relative to control plants.
[0354] 25. Transgenic plant, transgenic plant part or transgenic plant cell transformed with a construct according to embodiment 22 or 23.
[0355] 26. Method for the production of a transgenic plant having enhanced yield-related traits relative to control plants, preferably increased yield relative to control plants, and more preferably increased seed yield and/or increased biomass relative to control plants, comprising:
   [0356] (a) introducing and expressing in a plant cell or plant a nucleic acid encoding a CDKB-RKA polypeptide as defined in any of embodiments 1 to 17; and
   [0357] (b) cultivating said plant cell or plant under conditions promoting plant growth and development.
[0358] 27. Transgenic plant having enhanced yield-related traits relative to control plants, preferably increased yield relative to control plants, and more preferably increased seed yield and/or increased biomass, resulting from the introduction and expression therein of a nucleic acid encoding a CDKB-RKA polypeptide as defined in any of embodiments 1 to 17, or a transgenic plant cell derived from said transgenic plant.
[0359] 28. Transgenic plant according to embodiment 21, 25 or 27, or a transgenic plant cell derived therefrom, wherein said plant is a crop plant, such as beet, sugarbeet or alfalfa; or a monocotyledonous plant such as sugarcane; or a cereal, such as rice, maize, wheat, barley, millet, rye, triticale, sorghum, emmer, spelt, einkorn, teff, milo or oats.
[0360] 29. Harvestable parts of a plant according to any of embodiments 21, 25, 27 or 28 wherein said harvestable parts preferably are seeds.
[0361] 30. Products derived from or produced from a plant according to embodiment 29 and/or from harvestable parts of a plant according to any of embodiments 21, 25, 27 or 28.
[0362] 31. Use of a nucleic acid encoding a CDKB-RKA polypeptide as defined in any of embodiments 1 to 17 for enhancing yield-related traits in plants relative to control plants, preferably for increasing yield, and more preferably for increasing seed yield and/or for increasing biomass in plants relative to control plants.
[0363] 32. A method for the production of a product comprising the steps of growing the plants according to any of embodiments 21, 25, 27 or 28 and producing said product from or by
   [0364] (a) said plants; or
   [0365] (b) parts, including seeds, of said plants.
[0366] 33. Construct according to embodiment 22 or 23 comprised in a plant cell.
[0367] 34. Recombinant chromosomal DNA comprising the construct according to embodiment 22 or 23.
[0368] 35. Use of a nucleic acid encoding a CDKB-RKA polypeptide as defined in any of embodiments 1 to 17 as molecular marker for selecting for enhanced yield-related traits in plants relative to control plants, preferably for selecting for increased yield, and more preferably selecting for increasing seed yield and/or selecting for increasing biomass in plants relative to control plants.

[0369] In other embodiments, the invention is characterized by one or more of the following embodiments I to XV:
[0370] I. A method for increasing yield in a plant relative to a control plant, comprising introducing and expressing in said plant a nucleic acid molecule encoding a CDKB-RKA polypeptide, wherein said CDKB-RKA polypeptide is a modified CDKB polypeptide.
[0371] II. Method according to embodiment I, wherein said CDKB-RKA polypeptide lacks catalytic kinase activity.
[0372] III. Method according to embodiment I or II, wherein said CDKB-RKA polypeptide is a mutated and/or a truncated CDKB polypeptide.
[0373] IV. Method according to any of embodiments I to III, wherein said CDKB-RKA polypeptide is a truncated CDKB polypeptide comprising a deletion in the C-terminal half of said polypeptide that reduces, and preferably substantially inactivates, that kinase activity of said CDKB polypeptide.
[0374] V. Method according to any of embodiments I to IV, wherein said CDKB-RKA polypeptide is a truncated CDKB polypeptide comprising a deletion of the kinase domain or a part thereof of said CDKB polypeptide.
[0375] VI. Method according to any of embodiments I to V, wherein said CDKB-RKA polypeptide comprises a cyclin binding domain represented by a PPTALRE motif with no mismatches or with a mismatch at position 2 and/or 4 from left to right, preferably represented by SEQ ID NO: 403, and more preferably represented by SEQ ID NO: 404.
[0376] VII. Method according to any one of embodiments I to VI, wherein said nucleic acid encodes a polypeptide represented by SEQ ID NO: 318 or a homologue, orthologue or paralogue thereof, or a portion of said nucleic acid, or a nucleic acid capable of hybridising with said nucleic acid.
[0377] VIII. Method according to any of embodiments I to VII, wherein said increased yield relative to control plants comprises (i) increased seed yield and/or (ii) increased vegetative biomass, such as increased leaf biomass and/or increased root biomass.
[0378] IX. Method according to any one of embodiments I to VIII, wherein said nucleic acid is operably linked to a constitutive promoter, preferably to a constitutive plant promoter, more preferably to a medium strength constitutive plant promoter.
[0379] X. Plant, plant part thereof, including seeds, or plant cell, obtainable by a method according to any one of embodiments I to IX, wherein said plant, plant part or plant cell comprises a recombinant nucleic acid encoding a CDKB-RKA polypeptide as defined in any of embodiments I to VII.
[0380] XI. Construct comprising:
   [0381] (i) nucleic acid encoding a CDKB-RKA polypeptide as defined in any of embodiments I to VII;
   [0382] (ii) one or more control sequences capable of driving expression of the nucleic acid sequence of (i); wherein one of said control sequences is a constitutive promoter, preferably to a constitutive plant promoter, more preferably to a medium strength constitutive plant promoter and optionally
   [0383] (iii) a transcription termination sequence.
[0384] XII. Plant, plant part or plant cell transformed with a construct according to embodiment XI.
[0385] XIII. Method for the production of a transgenic plant having increased yield relative to control plants, and preferably increased seed yield and/or increased biomass such as increased vegetative biomass relative to control plants, comprising:
   [0386] (i) introducing and expressing in a plant cell or plant a nucleic acid encoding a CDKB-RKA polypeptide as defined in any of embodiments I to VII; and
   [0387] (ii) cultivating said plant cell or plant under conditions promoting plant growth and development.
[0388] XIV. Transgenic plant having increased yield relative to control plants, and preferably increased seed yield and/or increased biomass such as increased vegetative biomass, resulting from the introduction and expression therein of a nucleic acid encoding a CDKB-RKA polypeptide as defined in any of embodiments I to VII or a transgenic plant cell derived from said transgenic plant. XV. Use of a nucleic acid encoding a CDKB-RKA polypeptide as defined in any of embodiments I to VII for enhancing yield-related traits in plants relative to control plants, preferably for increasing yield, and more preferably for increasing seed yield and/or for increasing biomass biomass in plants relative to control plants and/or use of a construct according to embodiment XI in a method for making plants having enhanced yield-related traits, preferably increased yield relative to control plants, and more preferably increased seed yield and/or increased biomass relative to control plants.

### 3. UPA20-Like Polypeptides

[0389] The present invention is further characterized by one or more of the following embodiments.
[0390] 1. A method for enhancing yield-related traits in plants relative to control plants, comprising modulating expression in a plant of a nucleic acid encoding an UPA20-like polypeptide, wherein said UPA20-like polypeptide comprises a bHLH domain, and preferably comprises one or more domains selected from the group SM00353, PTHR12565:SF7, PTHR12565, PF00010, PS50888, SSF47459; and G3DSA:4.10.280.10.
[0391] 2. Method according to embodiment 1, wherein said modulated expression is effected by introducing and expressing in a plant said nucleic acid encoding said UPA20-like polypeptide.
[0392] 3. Method according to embodiment 1 or 2, wherein said enhanced yield-related traits comprise increased yield relative to control plants, and preferably comprise increased seed yield and/increase biomass relative to control plants.
[0393] 4. Method according to any one of embodiments 1 to 3, wherein said increased seed yield comprises any one or more of increased total seed weight, increased number of seeds, increased number of flowers per panicle, increased thousand kernel weight, and increased fill rate.
[0394] 5. Method according to any one of embodiments 1 to 4, wherein said enhanced yield-related traits are obtained under non-stress conditions.
[0395] 6. Method according to any one of embodiments 1 to 4, wherein said enhanced yield-related traits are obtained under conditions of drought stress, salt stress or nitrogen deficiency.
[0396] 7. Method according to any one of embodiments 1 to 6, wherein said bHLH domain comprises an amino acid sequence having at least 50% overall sequence identity to the amino acid represented by SEQ ID NO: 544.
[0397] 8. Method according to any of embodiments 1 to 7, wherein said UPA20-like polypeptide comprises one or more of the following motifs:

| | |
|---|---|
| | (SEQ ID NO: 538) |
| (i) | Motif 2: YIHVRARRGQATDSHSLAERVRRE[KR]ISERM |
| | [KR][LIF]LQ[DL]LVPGC[ND]K[IV]TGKA[LV]ML, |
| | (SEQ ID NO: 539) |
| (ii) | Motif 3: DEIINYVQSLQ[RN]QVEFLSMKLA[ST]V[NS]P |
| | [RLV]L[DY], |
| | (SEQ ID NO: 540) |
| (iii) | Motif 4: [MN][AS][RK]KRK[SA][RA]x[KG][FGS] |

[0398] 9. Method according to any of embodiments 1 to 8, wherein said UPA20-like polypeptide further comprises one or more of the following motifs:

| | |
|---|---|
| | (SEQ ID NO: 541) |
| (i) | Motif 5: RVRRE[KR]ISERM[RK][MIV]LQ[ARLS] |
| | LVPGCDK[IV]TGKAL[MI]LDEIINYVQSLQNQVEFLSM, |
| | (SEQ ID NO: 542) |
| (ii) | Motif 6: [KRS]KV[HE][EGD]E[PAE]P[KAT] |
| | GYIHVRARRGQATDSHSLAE, |
| | (SEQ ID NO: 543) |
| (iii) | Motif 7: [KR][LI]AS[LMV][SN]P[VLM][LF]Y[DG] |
| | FGMD[LSR] |

[0399] 10. Method according to any of embodiments 1 to 9, wherein said UPA20-like polypeptide comprises a conserved domain (or motif) with at least 50%, sequence identity to a conserved domain selected from any one of:
   [0400] (i) amino acid 186 to 236 in SEQ ID NO:2 (motif 8—SEQ ID NO: 556);
   [0401] (ii) amino acid 174 to 231 in SEQ ID NO:2 (motif 9—SEQ ID NO: 557);
   [0402] (iii) amino acid 183 to 230 in SEQ ID NO:2 (motif 10—SEQ ID NO: 558);
   [0403] (iv) amino acid 181 to 231 in SEQ ID NO:2 (motif 11—SEQ ID NO: 559);
   [0404] (v) amino acid 176 to 255 in SEQ ID NO:2 (motif 12—SEQ ID NO: 560); and
   [0405] (vi) amino acid 176 to 257 in SEQ ID NO:2 (motif 13—SEQ ID NO: 561).
[0406] 11. Method according to any one of embodiments 1 to 10, wherein said nucleic acid encoding a UPA20-like polypeptide is of plant origin, preferably from a dicotyledonous plant, further preferably from the family Salicaceae, more preferably from the genus Populus, most preferably the nucleic acid is from Populus trichocarpa.
[0407] 12. Method according to any one of embodiments 1 to 11, wherein said nucleic acid encoding a UPA20-like polypeptide encodes any one of the polypeptides listed in Table A3 or is a portion of such a nucleic acid, or a nucleic acid capable of hybridising with such a nucleic acid.
[0408] 13. Method according to any one of embodiments 1 to 12, wherein said nucleic acid sequence encodes an orthologue or paralogue of any of the polypeptides given in Table A3.
[0409] 14. Method according to any one of embodiments 1 to 13, wherein said nucleic acid encodes the polypeptide represented by SEQ ID NO: 407 or a homologue thereof.
[0410] 15. Method according to any one of embodiments 1 to 14, wherein said nucleic acid is operably linked to a constitutive promoter, preferably to a medium strength constitutive promoter, preferably to a plant promoter, more preferably to a GOS2 promoter, most preferably to a GOS2 promoter from rice.
[0411] 16. Plant, plant part thereof, including seeds, or plant cell, obtainable by a method according to any one of embodiments 1 to 15, wherein said plant, plant part or plant cell comprises a recombinant nucleic acid encoding a UPA20-like polypeptide as defined in any of embodiments 1 and 7 to 14.
[0412] 17. Plant according to embodiment 16, or a plant cell derived therefrom, wherein said plant is a crop plant, such as beet, sugarbeet or alfalfa; or a monocotyledonous plant such as sugarcane; or a cereal, such as rice, maize, wheat, barley, millet, rye, triticale, sorghum, emmer, spelt, secale, einkorn, teff, milo or oats.
[0413] 18. Construct comprising:
   [0414] (i) nucleic acid encoding a UPA20-like polypeptide as defined in any of embodiments 1 and 7 to 14;
   [0415] (ii) one or more control sequences capable of driving expression of the nucleic acid sequence of (i); and optionally
   [0416] (iii) a transcription termination sequence.
[0417] 19. Construct according to embodiment 18, wherein one of said control sequences is a constitutive promoter, preferably a medium strength constitutive promoter, preferably to a plant promoter, more preferably a GOS2 promoter, most preferably a GOS2 promoter from rice.
[0418] 20. Use of a construct according to embodiment 18 or 19 in a method for making plants having enhanced yield-related traits, preferably increased yield relative to control plants, and more preferably increased seed yield and/or increased biomass relative to control plants.
[0419] 21. Plant, plant part or plant cell transformed with a construct according to embodiment 18 or 19.
[0420] 22. Plant according to embodiment 21, or a plant cell derived therefrom, wherein said plant is a crop plant, such as beet, sugarbeet or alfalfa; or a monocotyledonous plant such as sugarcane; or a cereal, such as rice, maize, wheat, barley, millet, rye, triticale, sorghum, emmer, spelt, secale, einkorn, teff, milo or oats.
[0421] 23. Method for the production of a transgenic plant having enhanced yield-related traits relative to control plants, preferably increased yield relative to control plants, and more preferably increased seed yield and/or increased biomass relative to control plants, comprising:
   [0422] (i) introducing and expressing in a plant cell or plant a nucleic acid encoding a UPA20-like polypeptide as defined in any of embodiments 1 and 7 to 14; and
   [0423] (ii) cultivating said plant cell or plant under conditions promoting plant growth and development.
[0424] 24. Transgenic plant having enhanced yield-related traits relative to control plants, preferably increased yield relative to control plants, and more preferably increased seed yield, resulting from modulated expression of a nucleic acid encoding a UPA20-like polypeptide as defined in any of embodiments 1 and 7 to 14 or a transgenic plant cell derived from said transgenic plant.
[0425] 25. Transgenic plant according to embodiment 24, or a transgenic plant cell derived therefrom, wherein said plant is a crop plant, such as beet, sugarbeet or alfalfa; or a monocotyledonous plant such as sugarcane; or a cereal, such as rice, maize, wheat, barley, millet, rye, triticale, sorghum, emmer, spelt, secale, einkorn, teff, milo or oats.
[0426] 26. Harvestable parts of a plant according to any of embodiments 16-17, 21-22, and 24-25, wherein said harvestable parts are preferably shoot biomass and/or seeds.
[0427] 27. Products derived from a plant according to any of embodiments 16-17, 21-22, and 24-25, and/or from harvestable parts of a plant according to embodiment 26.
[0428] 28. Isolated nucleic acid molecule selected from:
   [0429] (i) a nucleic acid represented by any one of SEQ ID NO: 458, 460 and 496;
   [0430] (ii) the complement of a nucleic acid represented by any one of SEQ ID NO: 458, 460 and 496;
   [0431] (iii) a nucleic acid encoding a UPA20-like polypeptide having in increasing order of preference at least 50%, 51%, 52%, 53%, 54%, 55%, 56%, 57%, 58%, 59%, 60%, 61%, 62%, 63%, 64%, 65%, 66%, 67%, 68%, 69%, 70%, 71%, 72%, 73%, 74%, 75%, 76%, 77%, 78%, 79%, 80%, 81%, 82%, 83%, 84%, 85%, 86%, 87%, 88%, 89%, 90%, 91%, 92%, 93%, 94%, 95%, 96%, 97%, 98%, or 99% sequence identity to the amino acid sequence represented by any one of SEQ ID NO: 459, 461 and 497, and additionally or alternatively comprising one or more motifs having in increasing order of preference at least 50%, 55%, 60%, 65%, 70%, 75%, 80%, 85%, 90%, 95%, 96%, 97%, 98%, 99% or more sequence identity to any one or more of the motifs given in SEQ ID NO: 538, 539, 540, 541, 542, 543, 556, 557, 558, 559, 560, and 561 (motifs 2 to 13), and further preferably conferring enhanced yield-related traits relative to control plants.
   [0432] (iv) a nucleic acid molecule which hybridizes with a nucleic acid molecule of (i) to (iii) under high stringency hybridization conditions and preferably confers enhanced yield-related traits relative to control plants.
[0433] 29. Isolated polypeptide selected from:
   [0434] (i) an amino acid sequence represented by any one of SEQ ID NO: 459, 461 and 497;
   [0435] (ii) an amino acid sequence having, in increasing order of preference, at least 50%, 51%, 52%, 53%, 54%, 55%, 56%, 57%, 58%, 59%, 60%, 61%, 62%, 63%, 64%, 65%, 66%, 67%, 68%, 69%, 70%, 71%, 72%, 73%, 74%, 75%, 76%, 77%, 78%, 79%, 80%, 81%, 82%, 83%, 84%, 85%, 86%, 87%, 88%, 89%, 90%, 91%, 92%, 93%, 94%, 95%, 96%, 97%, 98%, or 99% sequence identity to the amino acid sequence represented by any one of SEQ ID NO: 459, 461 and 497, and additionally or alternatively comprising one or more motifs having in increasing order of preference at least 50%, 55%, 60%, 65%, 70%, 75%, 80%, 85%, 90%, 95%, 96%, 97%, 98%, 99% or more sequence identity to any one or more of the motifs given in SEQ ID NO: 538, 539, 540, 541, 542, 543, 556, 557, 558, 559, 560, and 561 (motifs 2 to 13), and further preferably conferring enhanced yield-related traits relative to control plants;
   [0436] (iii) derivatives of any of the amino acid sequences given in (i) or (ii) above.
[0437] 30. Use of a nucleic acid encoding a UPA20-like polypeptide as defined in any of embodiments 1 and 7 to 14 and 28 for enhancing yield-related traits in plants relative to control plants, preferably for increasing yield, and more preferably for increasing seed yield in plants relative to control plants.
[0438] 31. Use of a nucleic acid as defined in embodiment 28 and encoding a UPA20-like polypeptide for enhancing yield-related traits in plants relative to control plants, preferably for increasing yield, and more preferably for increasing seed yield in plants relative to control plants.
[0439] 32. Use of a nucleic acid encoding a UPA20-like polypeptide as defined in any of embodiments 1 and 7 to 14 and 29 as molecular marker.
[0440] 33. Use of a nucleic acid as defined in embodiment 28 and encoding a UPA20-like polypeptide as defined in any of embodiments 1 and 7 to 14 and 29 as molecular marker.

[0441] More particularly, the invention is characterized by one or more of the following embodiments 1 to 12.
[0442] 1. A method for the production of a transgenic plant having enhanced seed yield relative to a control plant, comprising the steps of:
   [0443] (i) introducing and expressing in a plant cell or plant a nucleic acid encoding an UPA20-like polypeptide, wherein said nucleic acid is operably linked to a constitutive plant promoter, and wherein said UPA20-like polypeptide comprises the polypeptide represented by SEQ ID NO: 407 or a homologue thereof which has at least 80% overall sequence identity to SEQ ID NO: 407, and
   [0444] (ii) cultivating said plant cell or plant under conditions promoting plant growth and development
   [0445] wherein said increased seed yield comprises at least two parameters selected from the group comprising of increased total seed weight, increased number of seeds, increased number of flowers per panicle, and increased fill rate.
[0446] 2. Method according to embodiment 1, wherein said nucleic acid is operably linked to a GOS2 promoter.
[0447] 3. Method according to embodiment 1 or 2, wherein said GOS2 promoter is a GOS2 promoter from rice.
[0448] 4. Method according to any of embodiments 1 to 3, wherein said increased seed yield comprises at least three parameters selected from the group comprising of increased total seed weight, increased number of seeds, increased number of flowers per panicle, and increased fill rate.
[0449] 5. Method according to any of embodiments 1 to 4, wherein said increased seed yield consist of an increase in all parameters from the group consisting of increased total seed weight, increased number of seeds, increased number of flowers per panicle, and increased fill rate.
[0450] 6. Method according to any of embodiments 1 to 5, wherein said increase in seed yield comprises an increase of at least 5% in said plant as compared to control plants of each of said parameters.
[0451] 7. Method according to any of embodiments 1 to 6, wherein said increase in seed yield further comprises an increased thousand kernel weight of said plant as compared to a control plant.
[0452] 8. Method according to any of embodiments 1 to 7, wherein said increased yield is obtained under non-stress conditions.
[0453] 9. Method according to any one for embodiments 1 to 8, wherein said plant is a monocotyledonous plant.
[0454] 10. Method according to embodiment 9, wherein said plant is a cereal.
[0455] 11. Transgenic plant having enhanced seed yield as defined in any of embodiments 4 to 7 relative to control plants, resulting from introduction and expression of a nucleic acid encoding a UPA20-like polypeptide as defined in embodiment 1 in said plant, or a transgenic plant cell derived from said transgenic plant.
[0456] 12. Use of a nucleic acid encoding a UPA20-like polypeptide as defined in embodiment 1 for enhancing seed yield as defined in any of embodiments 4 to 7 in a transgenic plant relative to a control plant.

### DEFINITIONS

[0457] The following definitions will be used throughout the present application. The section captions and headings in this application are for convenience and reference purpose only and should not affect in any way the meaning or interpretation of this application. The technical terms and expressions used within the scope of this application are generally to be given the meaning commonly applied to them in the pertinent art of plant biology, molecular biology, bioinformatics and plant breeding. All of the following term definitions apply to the complete content of this application. The term “essentially”, “about”, “approximately” and the like in connection with an attribute or a value, particularly also define exactly the attribute or exactly the value, respectively. The term “about” in the context of a given numeric value or range relates in particular to a value or range that is within 20%, within 10%, or within 5% of the value or range given. As used herein, the term “comprising” also encompasses the term “consisting of”.

### Peptide(s)/Protein(s)

[0458] The terms “peptides”, “oligopeptides”, “polypeptide” and “protein” are used interchangeably herein and refer to amino acids in a polymeric form of any length, linked together by peptide bonds, unless mentioned herein otherwise.

### Polynucleotide(s)/Nucleic Acid(s)/Nucleic Acid Sequence(s)/Nucleotide Sequence(s)

[0459] The terms “polynucleotide(s)”, “nucleic acid sequence(s)”, “nucleotide sequence(s)”, “nucleic acid(s)”, “nucleic acid molecule” are used interchangeably herein and refer to nucleotides, either ribonucleotides or deoxyribonucleotides or a combination of both, in a polymeric unbranched form of any length.

### Homologue(s)

[0460] “Homologues” of a protein encompass peptides, oligopeptides, polypeptides, proteins and enzymes having amino acid substitutions, deletions and/or insertions relative to the unmodified protein in question and having similar biological and functional activity as the unmodified protein from which they are derived.

[0461] Orthologues and paralogues are two different forms of homologues and encompass evolutionary concepts used to describe the ancestral relationships of genes. Paralogues are genes within the same species that have originated through duplication of an ancestral gene; orthologues are genes from different organisms that have originated through speciation, and are also derived from a common ancestral gene.

[0462] A “deletion” refers to removal of one or more amino acids from a protein.

[0463] An “insertion” refers to one or more amino acid residues being introduced into a predetermined site in a protein. Insertions may comprise N-terminal and/or C-terminal fusions as well as intra-sequence insertions of single or multiple amino acids. Generally, insertions within the amino acid sequence will be smaller than N- or C-terminal fusions, of the order of about 1 to 10 residues. Examples of N- or C-terminal fusion proteins or peptides include the binding domain or activation domain of a transcriptional activator as used in the yeast two-hybrid system, phage coat proteins, (histidine)-6-tag, glutathione S-transferase-tag, protein A, maltose-binding protein, dihydrofolate reductase, Tag•100 epitope, c-myc epitope, FLAG®-epitope, lacZ, CMP (calmodulin-binding peptide), HA epitope, protein C epitope and VSV epitope.

[0464] A “substitution” refers to replacement of amino acids of the protein with other amino acids having similar properties (such as similar hydrophobicity, hydrophilicity, antigenicity, propensity to form or break α-helical structures or β-sheet structures). Amino acid substitutions are typically of single residues, but may be clustered depending upon functional constraints placed upon the polypeptide and may range from 1 to 10 amino acids. The amino acid substitutions are preferably conservative amino acid substitutions. Conservative substitution tables are well known in the art (see for example Creighton (1984) Proteins. W.H. Freeman and Company (Eds) and Table 1 below).

TABLE 1
Example of conserved amino acid substitutions

| | | | Conservative |
|---|---|---|---|
| Residue | Conservative Substitutions | Residue | Substitutions |
| Ala | Ser | Leu | Ile; Val |
| Arg | Lys | Lys | Arg; Gln |
| Asn | Gln; His | Met | Leu; Ile |
| Asp | Glu | Phe | Met; Leu; Tyr |
| Gln | Asn | Ser | Thr; Gly |
| Cys | Ser | Thr | Ser; Val |
| Glu | Asp | Trp | Tyr |
| Gly | Pro | Tyr | Trp; Phe |
| His | Asn; Gln | Val | Ile; Leu |
| Ile | Leu, Val | | |

[0465] Amino acid substitutions, deletions and/or insertions may readily be made using peptide synthetic techniques known in the art, such as solid phase peptide synthesis and the like, or by recombinant DNA manipulation. Methods for the manipulation of DNA sequences to produce substitution, insertion or deletion variants of a protein are well known in the art. For example, techniques for making substitution mutations at predetermined sites in DNA are well known to those skilled in the art and include M13 mutagenesis, T7-Gen in vitro mutagenesis (USB, Cleveland, Ohio), QuickChange Site Directed mutagenesis (Stratagene, San Diego, Calif.), PCR-mediated site-directed mutagenesis or other site-directed mutagenesis protocols (see Current Protocols in Molecular Biology, John Wiley & Sons, N.Y. (1989 and yearly updates)).

### Derivatives

[0466] “Derivatives” include peptides, oligopeptides, polypeptides which may, compared to the amino acid sequence of the naturally-occurring form of the protein, such as the protein of interest, comprise substitutions of amino acids with non-naturally occurring amino acid residues, or additions of non-naturally occurring amino acid residues. “Derivatives” of a protein also encompass peptides, oligopeptides, polypeptides which comprise naturally occurring altered (glycosylated, acylated, prenylated, phosphorylated, myristoylated, sulphated etc.) or non-naturally altered amino acid residues compared to the amino acid sequence of a naturally-occurring form of the polypeptide. A derivative may also comprise one or more non-amino acid substituents or additions compared to the amino acid sequence from which it is derived, for example a reporter molecule or other ligand, covalently or non-covalently bound to the amino acid sequence, such as a reporter molecule which is bound to facilitate its detection, and non-naturally occurring amino acid residues relative to the amino acid sequence of a naturally-occurring protein. Furthermore, “derivatives” also include fusions of the naturally-occurring form of the protein with tagging peptides such as FLAG, HIS6 or thioredoxin (for a review of tagging peptides, see Terpe, Appl. Microbiol. Biotechnol. 60, 523-533, 2003).

### Domain, Motif/Consensus Sequence/Signature

[0467] The term “domain” refers to a set of amino acids conserved at specific positions along an alignment of sequences of evolutionarily related proteins. While amino acids at other positions can vary between homologues, amino acids that are highly conserved at specific positions indicate amino acids that are likely essential in the structure, stability or function of a protein. Identified by their high degree of conservation in aligned sequences of a family of protein homologues, they can be used as identifiers to determine if any polypeptide in question belongs to a previously identified polypeptide family.

[0468] The term “motif” or “consensus sequence” or “signature” refers to a short conserved region in the sequence of evolutionarily related proteins. Motifs are frequently highly conserved parts of domains, but may also include only part of the domain, or be located outside of conserved domain (if all of the amino acids of the motif fall outside of a defined domain).

[0469] Specialist databases exist for the identification of domains, for example, SMART (Schultz et al. (1998) Proc. Natl. Acad. Sci. USA 95, 5857-5864; Letunic et al. (2002) Nucleic Acids Res 30, 242-244), InterPro (Mulder et al., (2003) Nucl. Acids. Res. 31, 315-318), Prosite (Bucher and Bairoch (1994), A generalized profile syntax for biomolecular sequences motifs and its function in automatic sequence interpretation. (In) ISMB-94; Proceedings 2nd International Conference on Intelligent Systems for Molecular Biology. Altman R., Brutlag D., Karp P., Lathrop R., Searls D., Eds., pp 53-61, AAAI Press, Menlo Park; Hulo et al., Nucl. Acids. Res. 32:D134-D137, (2004)), or Pfam (Bateman et al., Nucleic Acids Research 30(1): 276-280 (2002)). A set of tools for in silico analysis of protein sequences is available on the ExPASy proteomics server (Swiss Institute of Bioinformatics (Gasteiger et al., ExPASy: the proteomics server for in-depth protein knowledge and analysis, Nucleic Acids Res. 31:3784-3788 (2003)). Domains or motifs may also be identified using routine techniques, such as by sequence alignment.

[0470] Methods for the alignment of sequences for comparison are well known in the art, such methods include GAP, BESTFIT, BLAST, FASTA and TFASTA. GAP uses the algorithm of Needleman and Wunsch ((1970) J Mol Biol 48: 443-453) to find the global (i.e. spanning the complete sequences) alignment of two sequences that maximizes the number of matches and minimizes the number of gaps. The BLAST algorithm (Altschul et al. (1990) J Mol Biol 215: 403-10) calculates percent sequence identity and performs a statistical analysis of the similarity between the two sequences. The software for performing BLAST analysis is publicly available through the National Centre for Biotechnology Information (NCBI). Homologues may readily be identified using, for example, the ClustalW multiple sequence alignment algorithm (version 1.83), with the default pairwise alignment parameters, and a scoring method in percentage. Global percentages of similarity and identity may also be determined using one of the methods available in the MatGAT software package (Campanella et al., BMC Bioinformatics. 2003 Jul. 10; 4:29. MatGAT: an application that generates similarity/identity matrices using protein or DNA sequences.). Minor manual editing may be performed to optimise alignment between conserved motifs, as would be apparent to a person skilled in the art. Furthermore, instead of using full-length sequences for the identification of homologues, specific domains may also be used. The sequence identity values may be determined over the entire nucleic acid or amino acid sequence or over selected domains or conserved motif(s), using the programs mentioned above using the default parameters. For local alignments, the Smith-Waterman algorithm is particularly useful (Smith T F, Waterman M S (1981) J. Mol. Biol 147(1); 195-7).

### Reciprocal BLAST

[0471] Typically, this involves a first BLAST involving BLASTing a query sequence (for example using any of the sequences listed in Tables A of the Examples section) against any sequence database, such as the publicly available NCBI database. BLASTN or TBLASTX (using standard default values) are generally used when starting from a nucleotide sequence, and BLASTP or TBLASTN (using standard default values) when starting from a protein sequence. The BLAST results may optionally be filtered. The full-length sequences of either the filtered results or non-filtered results are then BLASTed back (second BLAST) against sequences from the organism from which the query sequence is derived. The results of the first and second BLASTs are then compared. A paralogue is identified if a high-ranking hit from the first blast is from the same species as from which the query sequence is derived, a BLAST back then ideally results in the query sequence amongst the highest hits; an orthologue is identified if a high-ranking hit in the first BLAST is not from the same species as from which the query sequence is derived, and preferably results upon BLAST back in the query sequence being among the highest hits.

[0472] High-ranking hits are those having a low E-value. The lower the E-value, the more significant the score (or in other words the lower the chance that the hit was found by chance). Computation of the E-value is well known in the art. In addition to E-values, comparisons are also scored by percentage identity. Percentage identity refers to the number of identical nucleotides (or amino acids) between the two compared nucleic acid (or polypeptide) sequences over a particular length. In the case of large families, ClustalW may be used, followed by a neighbour joining tree, to help visualize clustering of related genes and to identify orthologues and paralogues.

### Hybridisation

[0473] The term “hybridisation” as defined herein is a process wherein substantially homologous complementary nucleotide sequences anneal to each other. The hybridisation process can occur entirely in solution, i.e. both complementary nucleic acids are in solution. The hybridisation process can also occur with one of the complementary nucleic acids immobilised to a matrix such as magnetic beads, Sepharose beads or any other resin. The hybridisation process can furthermore occur with one of the complementary nucleic acids immobilised to a solid support such as a nitro-cellulose or nylon membrane or immobilised by e.g. photolithography to, for example, a siliceous glass support (the latter known as nucleic acid arrays or microarrays or as nucleic acid chips). In order to allow hybridisation to occur, the nucleic acid molecules are generally thermally or chemically denatured to melt a double strand into two single strands and/or to remove hairpins or other secondary structures from single stranded nucleic acids.

[0474] The term “stringency” refers to the conditions under which a hybridisation takes place. The stringency of hybridisation is influenced by conditions such as temperature, salt concentration, ionic strength and hybridisation buffer composition. Generally, low stringency conditions are selected to be about 30° C. lower than the thermal melting point (Tₘ) for the specific sequence at a defined ionic strength and pH. Medium stringency conditions are when the temperature is 20° C. below Tₘ, and high stringency conditions are when the temperature is 10° C. below Tₘ. High stringency hybridisation conditions are typically used for isolating hybridising sequences that have high sequence similarity to the target nucleic acid sequence. However, nucleic acids may deviate in sequence and still encode a substantially identical polypeptide, due to the degeneracy of the genetic code. Therefore medium stringency hybridisation conditions may sometimes be needed to identify such nucleic acid molecules.

[0475] The Tₘ is the temperature under defined ionic strength and pH, at which 50% of the target sequence hybridises to a perfectly matched probe. The Tₘ is dependent upon the solution conditions and the base composition and length of the probe. For example, longer sequences hybridise specifically at higher temperatures. The maximum rate of hybridisation is obtained from about 16° C. up to 32° C. below Tₘ. The presence of monovalent cations in the hybridisation solution reduce the electrostatic repulsion between the two nucleic acid strands thereby promoting hybrid formation; this effect is visible for sodium concentrations of up to 0.4M (for higher concentrations, this effect may be ignored). Formamide reduces the melting temperature of DNA-DNA and DNA-RNA duplexes with 0.6 to 0.7° C. for each percent formamide, and addition of 50% formamide allows hybridisation to be performed at 30 to 45° C., though the rate of hybridisation will be lowered. Base pair mismatches reduce the hybridisation rate and the thermal stability of the duplexes. On average and for large probes, the Tm decreases about 1° C. per % base mismatch. The Tₘ may be calculated using the following equations, depending on the types of hybrids:

1) DNA-DNA hybrids (Meinkoth and Wahl, Anal. Biochem., 138: 267-284, 1984):

Tₘ=81.5° C.+16.6×log₁₀ [Na⁺]^{a}+0.41×([G/C^{b}]−500×[L^{c}]⁻¹−0.61×% formamide

2) DNA-RNA or RNA-RNA hybrids:

Tₘ=79.8° C.+18.5(log₁₀ [Na⁺]^{a})+0.58(% G/C^{b})+11.8(% G/C^{b})²−820/L^{c}

3) oligo-DNA or oligo-RNAs hybrids:

For <20 nucleotides: Tₘ=2(Iₙ)

For 20-35 nucleotides: Tₘ=22+1.46(Iₙ)

^{a} or for other monovalent cation, but only accurate in the 0.01-0.4 M range.
^{b} only accurate for % GC in the 30% to 75% range.
L=length of duplex in base pairs.
^{d} oligo, oligonucleotide; Iₙ,=effective length of primer=2×(no. of G/C)+(no. of A/T).

[0476] Non-specific binding may be controlled using any one of a number of known techniques such as, for example, blocking the membrane with protein containing solutions, additions of heterologous RNA, DNA, and SDS to the hybridisation buffer, and treatment with Rnase. For non-homologous probes, a series of hybridizations may be performed by varying one of (i) progressively lowering the annealing temperature (for example from 68° C. to 42° C.) or (ii) progressively lowering the formamide concentration (for example from 50% to 0%). The skilled artisan is aware of various parameters which may be altered during hybridisation and which will either maintain or change the stringency conditions.

[0477] Besides the hybridisation conditions, specificity of hybridisation typically also depends on the function of post-hybridisation washes. To remove background resulting from non-specific hybridisation, samples are washed with dilute salt solutions. Critical factors of such washes include the ionic strength and temperature of the final wash solution: the lower the salt concentration and the higher the wash temperature, the higher the stringency of the wash. Wash conditions are typically performed at or below hybridisation stringency. A positive hybridisation gives a signal that is at least twice of that of the background. Generally, suitable stringent conditions for nucleic acid hybridisation assays or gene amplification detection procedures are as set forth above. More or less stringent conditions may also be selected. The skilled artisan is aware of various parameters which may be altered during washing and which will either maintain or change the stringency conditions.

[0478] For example, typical high stringency hybridisation conditions for DNA hybrids longer than 50 nucleotides encompass hybridisation at 65° C. in 1×SSC or at 42° C. in 1×SSC and 50% formamide, followed by washing at 65° C. in 0.3×SSC. Examples of medium stringency hybridisation conditions for DNA hybrids longer than 50 nucleotides encompass hybridisation at 50° C. in 4×SSC or at 40° C. in 6×SSC and 50% formamide, followed by washing at 50° C. in 2×SSC. The length of the hybrid is the anticipated length for the hybridising nucleic acid. When nucleic acids of known sequence are hybridised, the hybrid length may be determined by aligning the sequences and identifying the conserved regions described herein. 1×SSC is 0.15M NaCl and 15 mM sodium citrate; the hybridisation solution and wash solutions may additionally include 5×Denhardt's reagent, 0.5-1.0% SDS, 100 μg/ml denatured, fragmented salmon sperm DNA, 0.5% sodium pyrophosphate.

[0479] For the purposes of defining the level of stringency, reference can be made to Sambrook et al. (2001) Molecular Cloning: a laboratory manual, 3rd Edition, Cold Spring Harbor Laboratory Press, CSH, New York or to Current Protocols in Molecular Biology, John Wiley & Sons, N.Y. (1989 and yearly updates).

### Splice Variant

[0480] The term “splice variant” as used herein encompasses variants of a nucleic acid sequence in which selected introns and/or exons have been excised, replaced, displaced or added, or in which introns have been shortened or lengthened. Such variants will be ones in which the biological activity of the protein is substantially retained; this may be achieved by selectively retaining functional segments of the protein. Such splice variants may be found in nature or may be manmade. Methods for predicting and isolating such splice variants are well known in the art (see for example Foissac and Schiex (2005) BMC Bioinformatics 6: 25).

### Allelic Variant

[0481] “Alleles” or “allelic variants” are alternative forms of a given gene, located at the same chromosomal position. Allelic variants encompass Single Nucleotide Polymorphisms (SNPs), as well as Small Insertion/Deletion Polymorphisms (INDELs). The size of INDELs is usually less than 100 bp. SNPs and INDELs form the largest set of sequence variants in naturally occurring polymorphic strains of most organisms.

### Endogenous Gene

[0482] Reference herein to an “endogenous” gene not only refers to the gene in question as found in a plant in its natural form (i.e., without there being any human intervention), but also refers to that same gene (or a substantially homologous nucleic acid/gene) in an isolated form subsequently (re)introduced into a plant (a transgene). For example, a transgenic plant containing such a transgene may encounter a substantial reduction of the transgene expression and/or substantial reduction of expression of the endogenous gene. The isolated gene may be isolated from an organism or may be manmade, for example by chemical synthesis.

### Gene Shuffling/Directed Evolution

[0483] “Gene shuffling” or “directed evolution” consists of iterations of DNA shuffling followed by appropriate screening and/or selection to generate variants of nucleic acids or portions thereof encoding proteins having a modified biological activity (Castle et al., (2004) Science 304(5674): 1151-4; U.S. Pat. Nos. 5,811,238 and 6,395,547).

### Construct

[0484] Artificial DNA (such as but, not limited to plasmids or viral DNA) capable of replication in a host cell and used for introduction of a DNA sequence of interest into a host cell or host organism. Host cells of the invention may be any cell selected from bacterial cells, such as Escherichia coli or Agrobacterium species cells, yeast cells, fungal, algal or cyanobacterial cells or plant cells. The skilled artisan is well aware of the genetic elements that must be present on the genetic construct in order to successfully transform, select and propagate host cells containing the sequence of interest. The sequence of interest is operably linked to one or more control sequences (at least to a promoter) as described herein. Additional regulatory elements may include transcriptional as well as translational enhancers. Those skilled in the art will be aware of terminator and enhancer sequences that may be suitable for use in performing the invention. An intron sequence may also be added to the 5′ untranslated region (UTR) or in the coding sequence to increase the amount of the mature message that accumulates in the cytosol, as described in the definitions section. Other control sequences (besides promoter, enhancer, silencer, intron sequences, 3′UTR and/or 5′UTR regions) may be protein and/or RNA stabilizing elements. Such sequences would be known or may readily be obtained by a person skilled in the art.

[0485] The genetic constructs of the invention may further include an origin of replication sequence that is required for maintenance and/or replication in a specific cell type. One example is when a genetic construct is required to be maintained in a bacterial cell as an episomal genetic element (e.g. plasmid or cosmid molecule). Preferred origins of replication include, but are not limited to, the f1-ori and colE1.

[0486] For the detection of the successful transfer of the nucleic acid sequences as used in the methods of the invention and/or selection of transgenic plants comprising these nucleic acids, it is advantageous to use marker genes (or reporter genes). Therefore, the genetic construct may optionally comprise a selectable marker gene. Selectable markers are described in more detail in the “definitions” section herein. The marker genes may be removed or excised from the transgenic cell once they are no longer needed. Techniques for marker removal are known in the art, useful techniques are described above in the definitions section.

### Regulatory Element/Control Sequence/Promoter

[0487] The terms “regulatory element”, “control sequence” and “promoter” are all used interchangeably herein and are to be taken in a broad context to refer to regulatory nucleic acid sequences capable of effecting expression of the sequences to which they are ligated. The term “promoter” typically refers to a nucleic acid control sequence located upstream from the transcriptional start of a gene and which is involved in recognising and binding of RNA polymerase and other proteins, thereby directing transcription of an operably linked nucleic acid. Encompassed by the aforementioned terms are transcriptional regulatory sequences derived from a classical eukaryotic genomic gene (including the TATA box which is required for accurate transcription initiation, with or without a CCAAT box sequence) and additional regulatory elements (i.e. upstream activating sequences, enhancers and silencers) which alter gene expression in response to developmental and/or external stimuli, or in a tissue-specific manner. Also included within the term is a transcriptional regulatory sequence of a classical prokaryotic gene, in which case it may include a −35 box sequence and/or −10 box transcriptional regulatory sequences. The term “regulatory element” also encompasses a synthetic fusion molecule or derivative that confers, activates or enhances expression of a nucleic acid molecule in a cell, tissue or organ.

[0488] A “plant promoter” comprises regulatory elements, which mediate the expression of a coding sequence segment in plant cells. Accordingly, a plant promoter need not be of plant origin, but may originate from viruses or micro-organisms, for example from viruses which attack plant cells. The “plant promoter” can also originate from a plant cell, e.g. from the plant which is transformed with the nucleic acid sequence to be expressed in the inventive process and described herein. This also applies to other “plant” regulatory signals, such as “plant” terminators. The promoters upstream of the nucleotide sequences useful in the methods of the present invention can be modified by one or more nucleotide substitution(s), insertion(s) and/or deletion(s) without interfering with the functionality or activity of either the promoters, the open reading frame (ORF) or the 3′-regulatory region such as terminators or other 3′ regulatory regions which are located away from the ORF. It is furthermore possible that the activity of the promoters is increased by modification of their sequence, or that they are replaced completely by more active promoters, even promoters from heterologous organisms. For expression in plants, the nucleic acid molecule must, as described above, be linked operably to or comprise a suitable promoter which expresses the gene at the right point in time and with the required spatial expression pattern.

[0489] For the identification of functionally equivalent promoters, the promoter strength and/or expression pattern of a candidate promoter may be analysed for example by operably linking the promoter to a reporter gene and assaying the expression level and pattern of the reporter gene in various tissues of the plant. Suitable well-known reporter genes include for example beta-glucuronidase or beta-galactosidase. The promoter activity is assayed by measuring the enzymatic activity of the beta-glucuronidase or beta-galactosidase. The promoter strength and/or expression pattern may then be compared to that of a reference promoter (such as the one used in the methods of the present invention). Alternatively, promoter strength may be assayed by quantifying mRNA levels or by comparing mRNA levels of the nucleic acid used in the methods of the present invention, with mRNA levels of housekeeping genes such as 18S rRNA, using methods known in the art, such as Northern blotting with densitometric analysis of autoradiograms, quantitative real-time PCR or RT-PCR (Heid et al., 1996 Genome Methods 6: 986-994). Generally by “weak promoter” is intended a promoter that drives expression of a coding sequence at a low level. By “low level” is intended at levels of about 1/10,000 transcripts to about 1/100,000 transcripts, to about 1/500,0000 transcripts per cell. Conversely, a “strong promoter” drives expression of a coding sequence at high level, or at about 1/10 transcripts to about 1/100 transcripts to about 1/1000 transcripts per cell. Generally, by “medium strength promoter” is intended a promoter that drives expression of a coding sequence at a lower level than a strong promoter, in particular at a level that is in all instances below that obtained when under the control of a 35S CaMV promoter.

### Operably Linked

[0490] The term “operably linked” as used herein refers to a functional linkage between the promoter sequence and the gene of interest, such that the promoter sequence is able to initiate transcription of the gene of interest.

### Constitutive Promoter

[0491] A “constitutive promoter” refers to a promoter that is transcriptionally active during most, but not necessarily all, phases of growth and development and under most environmental conditions, in at least one cell, tissue or organ. Table 2a below gives examples of constitutive promoters.

TABLE 2a
Examples of constitutive promoters

| Gene Source | Reference |
|---|---|
| Actin | McElroy et al, Plant Cell, 2: 163-171, 1990 |
| HMGP | WO 2004/070039 |
| CAMV 35S | Odell et al, Nature, 313: 810-812, 1985 |
| CaMV 19S | Nilsson et al., Physiol. Plant. 100: 456-462, 1997 |
| GOS2 | de Pater et al, Plant J Nov; 2(6): 837-44, 1992, |
| | WO 2004/065596 |
| Ubiquitin | Christensen et al, Plant Mol. Biol. |
| | 18: 675-689, 1992 |
| Rice cyclophilin | Buchholz et al, Plant Mol Biol. 25(5): 837-43, 1994 |
| Maize H3 histone | Lepetit et al, Mol. Gen. Genet. 231: 276-285, 1992 |
| Alfalfa H3 histone | Wu et al. Plant Mol. Biol. 11: 641-649, 1988 |
| Actin 2 | An et al, Plant J. 10(1); 107-121, 1996 |
| 34S FMV | Sanger et al., Plant. Mol. Biol., 14, 1990: 433-443 |
| Rubisco small | U.S. Pat. No. 4,962,028 |
| subunit | |
| OCS | Leisner (1988) Proc Natl Acad Sci USA 85(5): 2553 |
| SAD1 | Jain et al., Crop Science, 39 (6), 1999: 1696 |
| SAD2 | Jain et al., Crop Science, 39 (6), 1999: 1696 |
| nos | Shaw et al. (1984) Nucleic Acids |
| | Res. 12(20): 7831-7846 |
| V-ATPase | WO 01/14572 |
| Super promoter | WO 95/14098 |
| G-box proteins | WO 94/12015 |

### Ubiquitous Promoter

[0492] A “ubiquitous promoter” is active in substantially all tissues or cells of an organism.

### Developmentally-Regulated Promoter

[0493] A “developmentally-regulated promoter” is active during certain developmental stages or in parts of the plant that undergo developmental changes.

### Inducible Promoter

[0494] An “inducible promoter” has induced or increased transcription initiation in response to a chemical (for a review see Gatz 1997, Annu. Rev. Plant Physiol. Plant Mol. Biol., 48:89-108), environmental or physical stimulus, or may be “stress-inducible”, i.e. activated when a plant is exposed to various stress conditions, or a “pathogen-inducible” i.e. activated when a plant is exposed to exposure to various pathogens.

### Organ-Specific/Tissue-Specific Promoter

[0495] An “organ-specific” or “tissue-specific promoter” is one that is capable of preferentially initiating transcription in certain organs or tissues, such as the leaves, roots, seed tissue etc. For example, a “root-specific promoter” is a promoter that is transcriptionally active predominantly in plant roots, substantially to the exclusion of any other parts of a plant, whilst still allowing for any leaky expression in these other plant parts. Promoters able to initiate transcription in certain cells only are referred to herein as “cell-specific”.

[0496] Examples of root-specific promoters are listed in Table 2b below:

TABLE 2b
Examples of root-specific promoters

| Gene Source | Reference |
|---|---|
| RCc3 | Plant Mol Biol. 1995 Jan; 27(2): 237-48 |
| Arabidopsis PHT1 | Koyama et al. J Biosci Bioeng. 2005 Jan; |
| | 99(1): 38-42.; Mudge et al. (2002, Plant J. 31: 341) |
| Medicago phosphate | Xiao et al., 2006, Plant Biol (Stuttg). 2006 |
| transporter | Jul; 8(4): 439-49 |
| Arabidopsis Pyk10 | Nitz et al. (2001) Plant Sci 161(2): 337-346 |
| root-expressible | Tingey et al., EMBO J. 6: 1, 1987. |
| genes | |
| tobacco auxin- | Van der Zaal et al., Plant Mol. Biol. 16, 983, 1991. |
| inducible gene | |
| β-tubulin | Oppenheimer, et al., Gene 63: 87, 1988. |
| tobacco root- | Conkling, et al., Plant Physiol. 93: 1203, 1990. |
| specific genes | |
| B. napus G1-3b | U.S. Pat. No. 5,401,836 |
| gene | |
| SbPRP1 | Suzuki et al., Plant Mol. Biol. 21: 109-119, 1993. |
| LRX1 | Baumberger et al. 2001, Genes & Dev. 15: 1128 |
| BTG-26 | US 20050044585 |
| Brassica napus | |
| LeAMT1 (tomato) | Lauter et al. (1996, PNAS 3: 8139) |
| The LeNRT1-1 | Lauter et al. (1996, PNAS 3: 8139) |
| (tomato) | |
| class I patatin gene | Liu et al., Plant Mol. Biol. 17 (6): 1139-1154 |
| (potato) | |
| KDC1 | Downey et al. (2000, J. Biol. Chem. 275: 39420) |
| (Daucus carota) | |
| TobRB7 gene | W Song (1997) PhD Thesis, North Carolina |
| | State University, Raleigh, NC USA |
| OsRAB5a (rice) | Wang et al. 2002, Plant Sci. 163: 273 |
| ALF5 (Arabidopsis) | Diener et al. (2001, Plant Cell 13: 1625) |
| NRT2; 1Np | Quesada et al. (1997, Plant Mol. Biol. 34: 265) |
| (N. plumbaginifolia) | |

[0497] A “seed-specific promoter” is transcriptionally active predominantly in seed tissue, but not necessarily exclusively in seed tissue (in cases of leaky expression). The seed-specific promoter may be active during seed development and/or during germination. The seed specific promoter may be endosperm/aleurone/embryo specific. Examples of seed-specific promoters (endosperm/aleurone/embryo specific) are shown in Table 2c to Table 2f below. Further examples of seed-specific promoters are given in Qing Qu and Takaiwa (Plant Biotechnol. J. 2, 113-125, 2004), which disclosure is incorporated by reference herein as if fully set forth.

TABLE 2c
Examples of seed-specific promoters

| Gene source | Reference |
|---|---|
| seed-specific genes | Simon et al., Plant Mol. Biol. 5: 191, 1985; |
| | Scofield et al., J. Biol. Chem. 262: 12202, 1987.; |
| | Baszczynski et al., Plant Mol. Biol. 14: 633, 1990. |
| Brazil Nut albumin | Pearson et al., Plant Mol. Biol. 18: 235-245, 1992. |
| legumin | Ellis et al., Plant Mol. Biol. 10: 203-214, 1988. |
| glutelin (rice) | Takaiwa et al., Mol. Gen. Genet. 208: 15-22, 1986; |
| | Takaiwa et al., FEBS Letts. 221: 43-47, 1987. |
| zein | Matzke et al Plant Mol Biol, 14(3): 323-32 1990 |
| napA | Stalberg et al, Planta 199: 515-519, 1996. |
| wheat LMW and HMW | Mol Gen Genet 216: 81-90, 1989; NAR 17: 461-2, 1989 |
| glutenin-1 | |
| wheat SPA | Albani et al, Plant Cell, 9: 171-184, 1997 |
| wheat α, β, γ-gliadins | EMBO J. 3: 1409-15, 1984 |
| barley Itr1 promoter | Diaz et al. (1995) Mol Gen Genet 248(5): 592-8 |
| barley B1, C, D, hordein | Theor Appl Gen 98: 1253-62, 1999; Plant J 4: 343-55, |
| | 1993; Mol Gen Genet 250: 750-60, 1996 |
| barley DOF | Mena et al, The Plant Journal, 116(1): 53-62, 1998 |
| blz2 | EP99106056.7 |
| synthetic promoter | Vicente-Carbajosa et al., Plant J. 13: 629-640, 1998. |
| rice prolamin NRP33 | Wu et al, Plant Cell Physiology 39(8) 885-889, 1998 |
| rice a-globulin Glb-1 | Wu et al, Plant Cell Physiology 39(8) 885-889, 1998 |
| rice OSH1 | Sato et al, Proc. Natl. Acad. Sci. USA, 93: 8117-8122, |
| | 1996 |
| rice a-globulin REB/OHP-1 | Nakase et al. Plant Mol. Biol. 33: 513-522, 1997 |
| rice ADP-glucose pyrophosphorylase | Trans Res 6: 157-68, 1997 |
| maize ESR gene family | Plant J 12: 235-46, 1997 |
| sorghum α-kafirin | DeRose et al., Plant Mol. Biol 32: 1029-35, 1996 |
| KNOX | Postma-Haarsma et al, Plant Mol. Biol. 39: 257-71, 1999 |
| rice oleosin | Wu et al, J. Biochem. 123: 386, 1998 |
| sunflower oleosin | Cummins et al., Plant Mol. Biol. 19: 873-876, 1992 |
| PRO0117, putative rice 40S | WO 2004/070039 |
| ribosomal protein | |
| PRO0136, rice alanine | unpublished |
| aminotransferase | |
| PRO0147, trypsin inhibitor | unpublished |
| ITR1 (barley) | |
| PRO0151, rice WSI18 | WO 2004/070039 |
| PRO0175, rice RAB21 | WO 2004/070039 |
| PRO005 | WO 2004/070039 |
| PRO0095 | WO 2004/070039 |
| α-amylase (Amy32b) | Lanahan et al, Plant Cell 4: 203-211, 1992; Skriver et al, |
| | Proc Natl Acad Sci USA 88: 7266-7270, 1991 |
| cathepsin β-like gene | Cejudo et al, Plant Mol Biol 20: 849-856, 1992 |
| Barley Ltp2 | Kalla et al., Plant J. 6: 849-60, 1994 |
| Chi26 | Leah et al., Plant J. 4: 579-89, 1994 |
| Maize B-Peru | Selinger et al., Genetics 149; 1125-38, 1998 |

TABLE 2d
examples of endosperm-specific promoters

| Gene source | Reference |
|---|---|
| glutelin (rice) | Takaiwa et al. (1986) Mol Gen Genet 208: 15-22; |
| | Takaiwa et al. (1987) FEBS Letts. 221: 43-47 |
| zein | Matzke et al., (1990) Plant Mol Biol 14(3): 323-32 |
| wheat LMW and | Colot et al. (1989) Mol Gen Genet 216: 81-90, |
| HMW glutenin-1 | Anderson et al. (1989) NAR 17: 461-2 |
| wheat SPA | Albani et al. (1997) Plant Cell 9: 171-184 |
| wheat gliadins | Rafalski et al. (1984) EMBO 3: 1409-15 |
| barley Itr1 promoter | Diaz et al. (1995) Mol Gen Genet 248(5): 592-8 |
| barley B1, C, D, | Cho et al. (1999) Theor Appl Genet 98: 1253-62; |
| hordein | Muller et al. (1993) Plant J 4: 343-55; |
| | Sorenson et al. (1996) Mol Gen Genet 250: 750-60 |
| barley DOF | Mena et al, (1998) Plant J 116(1): 53-62 |
| blz2 | Onate et al. (1999) J Biol Chem 274(14): 9175-82 |
| synthetic promoter | Vicente-Carbajosa et al. (1998) Plant J 13: 629-640 |
| rice prolamin | Wu et al, (1998) Plant Cell Physiol 39(8) 885-889 |
| NRP33 | |
| rice globulin Glb-1 | Wu et al. (1998) Plant Cell Physiol 39(8) 885-889 |
| rice globulin | Nakase et al. (1997) Plant Molec Biol 33: 513-522 |
| REB/OHP-1 | |
| rice ADP-glucose | Russell et al. (1997) Trans Res 6: 157-68 |
| pyrophosphorylase | |
| maize ESR | Opsahl-Ferstad et al. (1997) Plant J 12: 235-46 |
| gene family | |
| sorghum kafirin | DeRose et al. (1996) Plant Mol Biol 32: 1029-35 |

TABLE 2e
Examples of embryo specific promoters:

| Gene source | Reference |
|---|---|
| rice OSH1 | Sato et al, Proc. Natl. Acad. Sci. USA, |
| | 93: 8117-8122, 1996 |
| KNOX | Postma-Haarsma et al, Plant Mol. Biol. |
| | 39: 257-71, 1999 |
| PRO0151 | WO 2004/070039 |
| PRO0175 | WO 2004/070039 |
| PRO005 | WO 2004/070039 |
| PRO0095 | WO 2004/070039 |

TABLE 2f
Examples of aleurone-specific promoters:

| Gene source | Reference |
|---|---|
| α-amylase (Amy32b) | Lanahan et al, Plant Cell 4: 203-211, 1992; |
| | Skriver et al, Proc Natl Acad Sci USA |
| | 88: 7266-7270, 1991 |
| cathepsin β-like gene | Cejudo et al, Plant Mol Biol 20: 849-856, 1992 |
| Barley Ltp2 | Kalla et al., Plant J. 6: 849-60, 1994 |
| Chi26 | Leah et al., Plant J. 4: 579-89, 1994 |
| Maize B-Peru | Selinger et al., Genetics 149; 1125-38, 1998 |

[0498] A “green tissue-specific promoter” as defined herein is a promoter that is transcriptionally active predominantly in green tissue, substantially to the exclusion of any other parts of a plant, whilst still allowing for any leaky expression in these other plant parts.

[0499] Examples of green tissue-specific promoters which may be used to perform the methods of the invention are shown in Table 2g below.

TABLE 2g
Examples of green tissue-specific promoters

| Gene | Expression | Reference |
|---|---|---|
| Maize Orthophosphate | Leaf specific | Fukavama et al., Plant Physiol. |
| dikinase | | 2001 Nov; 127(3): 1136-46 |
| Maize | Leaf specific | Kausch et al., Plant Mol Biol. |
| Phosphoenolpyruvate | | 2001 Jan; 45(1): 1-15 |
| carboxylase | | |
| Rice | Leaf specific | Lin et al., 2004 DNA Seq. 2004 |
| Phosphoenolpyruvate | | Aug; 15(4): 269-76 |
| carboxylase | | |
| Rice small subunit | Leaf specific | Nomura et al., Plant Mol Biol. |
| Rubisco | | 2000 Sep; 44(1): 99-106 |
| rice beta expansin | Shoot specific | WO 2004/070039 |
| EXBP9 | | |
| Pigeonpea small | Leaf specific | Panguluri et al. Indian J Exp |
| subunit Rubisco | | Biol. 2005 Apr; 43(4): 369-72 |
| Pea RBCS3A | Leaf specific | |

[0500] Another example of a tissue-specific promoter is a meristem-specific promoter, which is transcriptionally active predominantly in meristematic tissue, substantially to the exclusion of any other parts of a plant, whilst still allowing for any leaky expression in these other plant parts. Examples of green meristem-specific promoters which may be used to perform the methods of the invention are shown in Table 2h below.

TABLE 2h
Examples of meristem-specific promoters

| Gene source | Expression pattern | Reference |
|---|---|---|
| rice OSH1 | Shoot apical meristem, | Sato et al. (1996) Proc. |
| | from embryo globular stage | Natl. Acad. Sci. |
| | to seedling stage | USA, 93: 8117-8122 |
| Rice metallothionein | Meristem specific | BAD87835.1 |
| WAK1 & WAK 2 | Shoot and root apical | Wagner & Kohorn |
| | meristems, and in | (2001) Plant Cell |
| | expanding leaves and | 13(2): 303-318 |
| | sepals | |

### Terminator

[0501] The term “terminator” encompasses a control sequence which is a DNA sequence at the end of a transcriptional unit which signals 3′ processing and polyadenylation of a primary transcript and termination of transcription. The terminator can be derived from the natural gene, from a variety of other plant genes, or from T-DNA. The terminator to be added may be derived from, for example, the nopaline synthase or octopine synthase genes, or alternatively from another plant gene, or less preferably from any other eukaryotic gene.

### Selectable Marker (Gene)/Reporter Gene

[0502] “Selectable marker”, “selectable marker gene” or “reporter gene” includes any gene that confers a phenotype on a cell in which it is expressed to facilitate the identification and/or selection of cells that are transfected or transformed with a nucleic acid construct of the invention. These marker genes enable the identification of a successful transfer of the nucleic acid molecules via a series of different principles. Suitable markers may be selected from markers that confer antibiotic or herbicide resistance, that introduce a new metabolic trait or that allow visual selection. Examples of selectable marker genes include genes conferring resistance to antibiotics (such as nptII that phosphorylates neomycin and kanamycin, or hpt, phosphorylating hygromycin, or genes conferring resistance to, for example, bleomycin, streptomycin, tetracyclin, chloramphenicol, ampicillin, gentamycin, geneticin (G418), spectinomycin or blasticidin), to herbicides (for example bar which provides resistance to Basta®; aroA or gox providing resistance against glyphosate, or the genes conferring resistance to, for example, imidazolinone, phosphinothricin or sulfonylurea), or genes that provide a metabolic trait (such as manA that allows plants to use mannose as sole carbon source or xylose isomerase for the utilisation of xylose, or antinutritive markers such as the resistance to 2-deoxyglucose). Expression of visual marker genes results in the formation of colour (for example β-glucuronidase, GUS or β-galactosidase with its coloured substrates, for example X-Gal), luminescence (such as the luciferin/luceferase system) or fluorescence (Green Fluorescent Protein, GFP, and derivatives thereof). This list represents only a small number of possible markers. The skilled worker is familiar with such markers. Different markers are preferred, depending on the organism and the selection method.

[0503] It is known that upon stable or transient integration of nucleic acids into plant cells, only a minority of the cells takes up the foreign DNA and, if desired, integrates it into its genome, depending on the expression vector used and the transfection technique used. To identify and select these integrants, a gene coding for a selectable marker (such as the ones described above) is usually introduced into the host cells together with the gene of interest. These markers can for example be used in mutants in which these genes are not functional by, for example, deletion by conventional methods. Furthermore, nucleic acid molecules encoding a selectable marker can be introduced into a host cell on the same vector that comprises the sequence encoding the polypeptides of the invention or used in the methods of the invention, or else in a separate vector. Cells which have been stably transfected with the introduced nucleic acid can be identified for example by selection (for example, cells which have integrated the selectable marker survive whereas the other cells die).

[0504] Since the marker genes, particularly genes for resistance to antibiotics and herbicides, are no longer required or are undesired in the transgenic host cell once the nucleic acids have been introduced successfully, the process according to the invention for introducing the nucleic acids advantageously employs techniques which enable the removal or excision of these marker genes. One such a method is what is known as co-transformation. The co-transformation method employs two vectors simultaneously for the transformation, one vector bearing the nucleic acid according to the invention and a second bearing the marker gene(s). A large proportion of transformants receives or, in the case of plants, comprises (up to 40% or more of the transformants), both vectors. In case of transformation with Agrobacteria, the transformants usually receive only a part of the vector, i.e. the sequence flanked by the T-DNA, which usually represents the expression cassette. The marker genes can subsequently be removed from the transformed plant by performing crosses. In another method, marker genes integrated into a transposon are used for the transformation together with desired nucleic acid (known as the Ac/Ds technology). The transformants can be crossed with a transposase source or the transformants are transformed with a nucleic acid construct conferring expression of a transposase, transiently or stable. In some cases (approx. 10%), the transposon jumps out of the genome of the host cell once transformation has taken place successfully and is lost. In a further number of cases, the transposon jumps to a different location. In these cases the marker gene must be eliminated by performing crosses. In microbiology, techniques were developed which make possible, or facilitate, the detection of such events. A further advantageous method relies on what is known as recombination systems; whose advantage is that elimination by crossing can be dispensed with. The best-known system of this type is what is known as the Cre/lox system. Cre1 is a recombinase that removes the sequences located between the loxP sequences. If the marker gene is integrated between the loxP sequences, it is removed once transformation has taken place successfully, by expression of the recombinase. Further recombination systems are the HIN/HIX, FLP/FRT and REP/STB system (Tribble et al., J. Biol. Chem., 275, 2000: 22255-22267; Velmurugan et al., J. Cell Biol., 149, 2000: 553-566). A site-specific integration into the plant genome of the nucleic acid sequences according to the invention is possible. Naturally, these methods can also be applied to microorganisms such as yeast, fungi or bacteria.

### Transgenic/Transgene/Recombinant

[0505] For the purposes of the invention, “transgenic”, “transgene” or “recombinant” means with regard to, for example, a nucleic acid sequence, an expression cassette, gene construct or a vector comprising the nucleic acid sequence or an organism transformed with the nucleic acid sequences, expression cassettes or vectors according to the invention, all those constructions brought about by recombinant methods in which either
[0506] (a) the nucleic acid sequences encoding proteins useful in the methods of the invention, or
[0507] (b) genetic control sequence(s) which is operably linked with the nucleic acid sequence according to the invention, for example a promoter, or
[0508] (c) a) and b)
   are not located in their natural genetic environment or have been modified by recombinant methods, it being possible for the modification to take the form of, for example, a substitution, addition, deletion, inversion or insertion of one or more nucleotide residues. The natural genetic environment is understood as meaning the natural genomic or chromosomal locus in the original plant or the presence in a genomic library. In the case of a genomic library, the natural genetic environment of the nucleic acid sequence is preferably retained, at least in part. The environment flanks the nucleic acid sequence at least on one side and has a sequence length of at least 50 bp, preferably at least 500 bp, especially preferably at least 1000 bp, most preferably at least 5000 bp. A naturally occurring expression cassette—for example the naturally occurring combination of the natural promoter of the nucleic acid sequences with the corresponding nucleic acid sequence encoding a polypeptide useful in the methods of the present invention, as defined above—becomes a transgenic expression cassette when this expression cassette is modified by non-natural, synthetic (“artificial”) methods such as, for example, mutagenic treatment. Suitable methods are described, for example, in U.S. Pat. No. 5,565,350 or WO 00/15815.

[0509] A transgenic plant for the purposes of the invention is thus understood as meaning, as above, that the nucleic acids used in the method of the invention are not present in, or originating from, the genome of said plant, or are present in the genome of said plant but not at their natural locus in the genome of said plant, it being possible for the nucleic acids to be expressed homologously or heterologously. However, as mentioned, transgenic also means that, while the nucleic acids according to the invention or used in the inventive method are at their natural position in the genome of a plant, the sequence has been modified with regard to the natural sequence, and/or that the regulatory sequences of the natural sequences have been modified. Transgenic is preferably understood as meaning the expression of the nucleic acids according to the invention at an unnatural locus in the genome, i.e. homologous or, preferably, heterologous expression of the nucleic acids takes place. Preferred transgenic plants are mentioned herein.

[0510] It shall further be noted that in the context of the present invention, the term “isolated nucleic acid” or “isolated polypeptide” may in some instances be considered as a synonym for a “recombinant nucleic acid” or a “recombinant polypeptide”, respectively and refers to a nucleic acid or polypeptide that is not located in its natural genetic environment and/or that has been modified by recombinant methods.

### Modulation

[0511] The term “modulation” means in relation to expression or gene expression, a process in which the expression level is changed by said gene expression in comparison to the control plant, the expression level may be increased or decreased. The original, unmodulated expression may be of any kind of expression of a structural RNA (rRNA, tRNA) or mRNA with subsequent translation. For the purposes of this invention, the original unmodulated expression may also be absence of any expression. The term “modulating the activity” shall mean any change of the expression of the inventive nucleic acid sequences or encoded proteins, which leads to increased yield and/or increased growth of the plants. The expression can increase from zero (absence of, or immeasurable expression) to a certain amount, or can decrease from a certain amount to immeasurable small amounts or zero.

### Expression

[0512] The term “expression” or “gene expression” means the transcription of a specific gene or specific genes or specific genetic construct. The term “expression” or “gene expression” in particular means the transcription of a gene or genes or genetic construct into structural RNA (rRNA, tRNA) or mRNA with or without subsequent translation of the latter into a protein. The process includes transcription of DNA and processing of the resulting mRNA product.

### Increased Expression/Overexpression

[0513] The term “increased expression” or “overexpression” as used herein means any form of expression that is additional to the original wild-type expression level. For the purposes of this invention, the original wild-type expression level might also be zero, i.e. absence of expression or immeasurable expression.

[0514] Methods for increasing expression of genes or gene products are well documented in the art and include, for example, overexpression driven by appropriate promoters, the use of transcription enhancers or translation enhancers. Isolated nucleic acids which serve as promoter or enhancer elements may be introduced in an appropriate position (typically upstream) of a non-heterologous form of a polynucleotide so as to upregulate expression of a nucleic acid encoding the polypeptide of interest. For example, endogenous promoters may be altered in vivo by mutation, deletion, and/or substitution (see, Kmiec, U.S. Pat. No. 5,565,350; Zarling et al., WO9322443), or isolated promoters may be introduced into a plant cell in the proper orientation and distance from a gene of the present invention so as to control the expression of the gene.

[0515] If polypeptide expression is desired, it is generally desirable to include a polyadenylation region at the 3′-end of a polynucleotide coding region. The polyadenylation region can be derived from the natural gene, from a variety of other plant genes, or from T-DNA. The 3′ end sequence to be added may be derived from, for example, the nopaline synthase or octopine synthase genes, or alternatively from another plant gene, or less preferably from any other eukaryotic gene.

[0516] An intron sequence may also be added to the 5′ untranslated region (UTR) or the coding sequence of the partial coding sequence to increase the amount of the mature message that accumulates in the cytosol. Inclusion of a spliceable intron in the transcription unit in both plant and animal expression constructs has been shown to increase gene expression at both the mRNA and protein levels up to 1000-fold (Buchman and Berg (1988) Mol. Cell. biol. 8: 4395-4405; Callis et al. (1987) Genes Dev 1:1183-1200). Such intron enhancement of gene expression is typically greatest when placed near the 5′ end of the transcription unit. Use of the maize introns Adh1-S intron 1, 2, and 6, the Bronze-1 intron are known in the art. For general information see: The Maize Handbook, Chapter 116, Freeling and Walbot, Eds., Springer, N.Y. (1994).

### Decreased Expression

[0517] Reference herein to “decreased expression” or “reduction or substantial elimination” of expression is taken to mean a decrease in endogenous gene expression and/or polypeptide levels and/or polypeptide activity relative to control plants. The reduction or substantial elimination is in increasing order of preference at least 10%, 20%, 30%, 40% or 50%, 60%, 70%, 80%, 85%, 90%, or 95%, 96%, 97%, 98%, 99% or more reduced compared to that of control plants.

[0518] For the reduction or substantial elimination of expression an endogenous gene in a plant, a sufficient length of substantially contiguous nucleotides of a nucleic acid sequence is required. In order to perform gene silencing, this may be as little as 20, 19, 18, 17, 16, 15, 14, 13, 12, 11, 10 or fewer nucleotides, alternatively this may be as much as the entire gene (including the 5′ and/or 3′ UTR, either in part or in whole). The stretch of substantially contiguous nucleotides may be derived from the nucleic acid encoding the protein of interest (target gene), or from any nucleic acid capable of encoding an orthologue, paralogue or homologue of the protein of interest. Preferably, the stretch of substantially contiguous nucleotides is capable of forming hydrogen bonds with the target gene (either sense or antisense strand), more preferably, the stretch of substantially contiguous nucleotides has, in increasing order of preference, 50%, 60%, 70%, 80%, 85%, 90%, 95%, 96%, 97%, 98%, 99%, 100% sequence identity to the target gene (either sense or antisense strand). A nucleic acid sequence encoding a (functional) polypeptide is not a requirement for the various methods discussed herein for the reduction or substantial elimination of expression of an endogenous gene.

[0519] This reduction or substantial elimination of expression may be achieved using routine tools and techniques. A preferred method for the reduction or substantial elimination of endogenous gene expression is by introducing and expressing in a plant a genetic construct into which the nucleic acid (in this case a stretch of substantially contiguous nucleotides derived from the gene of interest, or from any nucleic acid capable of encoding an orthologue, paralogue or homologue of any one of the protein of interest) is cloned as an inverted repeat (in part or completely), separated by a spacer (non-coding DNA).

[0520] In such a preferred method, expression of the endogenous gene is reduced or substantially eliminated through RNA-mediated silencing using an inverted repeat of a nucleic acid or a part thereof (in this case a stretch of substantially contiguous nucleotides derived from the gene of interest, or from any nucleic acid capable of encoding an orthologue, paralogue or homologue of the protein of interest), preferably capable of forming a hairpin structure. The inverted repeat is cloned in an expression vector comprising control sequences. A non-coding DNA nucleic acid sequence (a spacer, for example a matrix attachment region fragment (MAR), an intron, a polylinker, etc.) is located between the two inverted nucleic acids forming the inverted repeat. After transcription of the inverted repeat, a chimeric RNA with a self-complementary structure is formed (partial or complete). This double-stranded RNA structure is referred to as the hairpin RNA (hpRNA). The hpRNA is processed by the plant into siRNAs that are incorporated into an RNA-induced silencing complex (RISC). The RISC further cleaves the mRNA transcripts, thereby substantially reducing the number of mRNA transcripts to be translated into polypeptides. For further general details see for example, Grierson et al. (1998) WO 98/53083; Waterhouse et al. (1999) WO 99/53050).

[0521] Performance of the methods of the invention does not rely on introducing and expressing in a plant a genetic construct into which the nucleic acid is cloned as an inverted repeat, but any one or more of several well-known “gene silencing” methods may be used to achieve the same effects.

[0522] One such method for the reduction of endogenous gene expression is RNA-mediated silencing of gene expression (downregulation). Silencing in this case is triggered in a plant by a double stranded RNA sequence (dsRNA) that is substantially similar to the target endogenous gene. This dsRNA is further processed by the plant into about 20 to about 26 nucleotides called short interfering RNAs (siRNAs). The siRNAs are incorporated into an RNA-induced silencing complex (RISC) that cleaves the mRNA transcript of the endogenous target gene, thereby substantially reducing the number of mRNA transcripts to be translated into a polypeptide. Preferably, the double stranded RNA sequence corresponds to a target gene.

[0523] Another example of an RNA silencing method involves the introduction of nucleic acid sequences or parts thereof (in this case a stretch of substantially contiguous nucleotides derived from the gene of interest, or from any nucleic acid capable of encoding an orthologue, paralogue or homologue of the protein of interest) in a sense orientation into a plant. “Sense orientation” refers to a DNA sequence that is homologous to an mRNA transcript thereof. Introduced into a plant would therefore be at least one copy of the nucleic acid sequence. The additional nucleic acid sequence will reduce expression of the endogenous gene, giving rise to a phenomenon known as co-suppression. The reduction of gene expression will be more pronounced if several additional copies of a nucleic acid sequence are introduced into the plant, as there is a positive correlation between high transcript levels and the triggering of co-suppression.

[0524] Another example of an RNA silencing method involves the use of antisense nucleic acid sequences. An “antisense” nucleic acid sequence comprises a nucleotide sequence that is complementary to a “sense” nucleic acid sequence encoding a protein, i.e. complementary to the coding strand of a double-stranded cDNA molecule or complementary to an mRNA transcript sequence. The antisense nucleic acid sequence is preferably complementary to the endogenous gene to be silenced. The complementarity may be located in the “coding region” and/or in the “non-coding region” of a gene. The term “coding region” refers to a region of the nucleotide sequence comprising codons that are translated into amino acid residues. The term “non-coding region” refers to 5′ and 3′ sequences that flank the coding region that are transcribed but not translated into amino acids (also referred to as 5′ and 3′ untranslated regions).

[0525] Antisense nucleic acid sequences can be designed according to the rules of Watson and Crick base pairing. The antisense nucleic acid sequence may be complementary to the entire nucleic acid sequence (in this case a stretch of substantially contiguous nucleotides derived from the gene of interest, or from any nucleic acid capable of encoding an orthologue, paralogue or homologue of the protein of interest), but may also be an oligonucleotide that is antisense to only a part of the nucleic acid sequence (including the mRNA 5′ and 3′ UTR). For example, the antisense oligonucleotide sequence may be complementary to the region surrounding the translation start site of an mRNA transcript encoding a polypeptide. The length of a suitable antisense oligonucleotide sequence is known in the art and may start from about 50, 45, 40, 35, 30, 25, 20, 15 or 10 nucleotides in length or less. An antisense nucleic acid sequence according to the invention may be constructed using chemical synthesis and enzymatic ligation reactions using methods known in the art. For example, an antisense nucleic acid sequence (e.g., an antisense oligonucleotide sequence) may be chemically synthesized using naturally occurring nucleotides or variously modified nucleotides designed to increase the biological stability of the molecules or to increase the physical stability of the duplex formed between the antisense and sense nucleic acid sequences, e.g., phosphorothioate derivatives and acridine substituted nucleotides may be used. Examples of modified nucleotides that may be used to generate the antisense nucleic acid sequences are well known in the art. Known nucleotide modifications include methylation, cyclization and ‘caps’ and substitution of one or more of the naturally occurring nucleotides with an analogue such as inosine. Other modifications of nucleotides are well known in the art.

[0526] The antisense nucleic acid sequence can be produced biologically using an expression vector into which a nucleic acid sequence has been subcloned in an antisense orientation (i.e., RNA transcribed from the inserted nucleic acid will be of an antisense orientation to a target nucleic acid of interest). Preferably, production of antisense nucleic acid sequences in plants occurs by means of a stably integrated nucleic acid construct comprising a promoter, an operably linked antisense oligonucleotide, and a terminator.

[0527] The nucleic acid molecules used for silencing in the methods of the invention (whether introduced into a plant or generated in situ) hybridize with or bind to mRNA transcripts and/or genomic DNA encoding a polypeptide to thereby inhibit expression of the protein, e.g., by inhibiting transcription and/or translation. The hybridization can be by conventional nucleotide complementarity to form a stable duplex, or, for example, in the case of an antisense nucleic acid sequence which binds to DNA duplexes, through specific interactions in the major groove of the double helix. Antisense nucleic acid sequences may be introduced into a plant by transformation or direct injection at a specific tissue site. Alternatively, antisense nucleic acid sequences can be modified to target selected cells and then administered systemically. For example, for systemic administration, antisense nucleic acid sequences can be modified such that they specifically bind to receptors or antigens expressed on a selected cell surface, e.g., by linking the antisense nucleic acid sequence to peptides or antibodies which bind to cell surface receptors or antigens. The antisense nucleic acid sequences can also be delivered to cells using the vectors described herein.

[0528] According to a further aspect, the antisense nucleic acid sequence is an α-anomeric nucleic acid sequence. An α-anomeric nucleic acid sequence forms specific double-stranded hybrids with complementary RNA in which, contrary to the usual b-units, the strands run parallel to each other (Gaultier et al. (1987) Nucl Ac Res 15: 6625-6641). The antisense nucleic acid sequence may also comprise a 2′-o-methylribonucleotide (Inoue et al. (1987) Nucl Ac Res 15, 6131-6148) or a chimeric RNA-DNA analogue (Inoue et al. (1987) FEBS Lett. 215, 327-330).

[0529] The reduction or substantial elimination of endogenous gene expression may also be performed using ribozymes. Ribozymes are catalytic RNA molecules with ribonuclease activity that are capable of cleaving a single-stranded nucleic acid sequence, such as an mRNA, to which they have a complementary region. Thus, ribozymes (e.g., hammerhead ribozymes (described in Haselhoff and Gerlach (1988) Nature 334, 585-591) can be used to catalytically cleave mRNA transcripts encoding a polypeptide, thereby substantially reducing the number of mRNA transcripts to be translated into a polypeptide. A ribozyme having specificity for a nucleic acid sequence can be designed (see for example: Cech et al. U.S. Pat. No. 4,987,071; and Cech et al. U.S. Pat. No. 5,116,742). Alternatively, mRNA transcripts corresponding to a nucleic acid sequence can be used to select a catalytic RNA having a specific ribonuclease activity from a pool of RNA molecules (Bartel and Szostak (1993) Science 261, 1411-1418). The use of ribozymes for gene silencing in plants is known in the art (e.g., Atkins et al. (1994) WO 94/00012; Lenne et al. (1995) WO 95/03404; Lutziger et al. (2000) WO 00/00619; Prinsen et al. (1997) WO 97/13865 and Scott et al. (1997) WO 97/38116).

[0530] Gene silencing may also be achieved by insertion mutagenesis (for example, T-DNA insertion or transposon insertion) or by strategies as described by, among others, Angell and Baulcombe ((1999) Plant J 20(3): 357-62), (Amplicon VIGS WO 98/36083), or Baulcombe (WO 99/15682).

[0531] Gene silencing may also occur if there is a mutation on an endogenous gene and/or a mutation on an isolated gene/nucleic acid subsequently introduced into a plant. The reduction or substantial elimination may be caused by a non-functional polypeptide. For example, the polypeptide may bind to various interacting proteins; one or more mutation(s) and/or truncation(s) may therefore provide for a polypeptide that is still able to bind interacting proteins (such as receptor proteins) but that cannot exhibit its normal function (such as signalling ligand).

[0532] A further approach to gene silencing is by targeting nucleic acid sequences complementary to the regulatory region of the gene (e.g., the promoter and/or enhancers) to form triple helical structures that prevent transcription of the gene in target cells. See Helene, C., Anticancer Drug Res. 6, 569-84, 1991; Helene et al., Ann. N.Y. Acad. Sci. 660, 27-36 1992; and Maher, L. J. Bioassays 14, 807-15, 1992.

[0533] Other methods, such as the use of antibodies directed to an endogenous polypeptide for inhibiting its function in planta, or interference in the signalling pathway in which a polypeptide is involved, will be well known to the skilled man. In particular, it can be envisaged that manmade molecules may be useful for inhibiting the biological function of a target polypeptide, or for interfering with the signalling pathway in which the target polypeptide is involved.

[0534] Alternatively, a screening program may be set up to identify in a plant population natural variants of a gene, which variants encode polypeptides with reduced activity. Such natural variants may also be used for example, to perform homologous recombination.

[0535] Artificial and/or natural microRNAs (miRNAs) may be used to knock out gene expression and/or mRNA translation. Endogenous miRNAs are single stranded small RNAs of typically 19-24 nucleotides long. They function primarily to regulate gene expression and/or mRNA translation. Most plant microRNAs (miRNAs) have perfect or near-perfect complementarity with their target sequences. However, there are natural targets with up to five mismatches. They are processed from longer non-coding RNAs with characteristic fold-back structures by double-strand specific RNases of the Dicer family. Upon processing, they are incorporated in the RNA-induced silencing complex (RISC) by binding to its main component, an Argonaute protein. MiRNAs serve as the specificity components of RISC, since they base-pair to target nucleic acids, mostly mRNAs, in the cytoplasm. Subsequent regulatory events include target mRNA cleavage and destruction and/or translational inhibition. Effects of miRNA overexpression are thus often reflected in decreased mRNA levels of target genes.

[0536] Artificial microRNAs (amiRNAs), which are typically 21 nucleotides in length, can be genetically engineered specifically to negatively regulate gene expression of single or multiple genes of interest. Determinants of plant microRNA target selection are well known in the art. Empirical parameters for target recognition have been defined and can be used to aid in the design of specific amiRNAs, (Schwab et al., Dev. Cell 8, 517-527, 2005). Convenient tools for design and generation of amiRNAs and their precursors are also available to the public (Schwab et al., Plant Cell 18, 1121-1133, 2006).

[0537] For optimal performance, the gene silencing techniques used for reducing expression in a plant of an endogenous gene requires the use of nucleic acid sequences from monocotyledonous plants for transformation of monocotyledonous plants, and from dicotyledonous plants for transformation of dicotyledonous plants. Preferably, a nucleic acid sequence from any given plant species is introduced into that same species. For example, a nucleic acid sequence from rice is transformed into a rice plant. However, it is not an absolute requirement that the nucleic acid sequence to be introduced originates from the same plant species as the plant in which it will be introduced. It is sufficient that there is substantial homology between the endogenous target gene and the nucleic acid to be introduced.

[0538] Described above are examples of various methods for the reduction or substantial elimination of expression in a plant of an endogenous gene. A person skilled in the art would readily be able to adapt the aforementioned methods for silencing so as to achieve reduction of expression of an endogenous gene in a whole plant or in parts thereof through the use of an appropriate promoter, for example.

### Transformation

[0539] The term “introduction” or “transformation” as referred to herein encompasses the transfer of an exogenous polynucleotide into a host cell, irrespective of the method used for transfer. Plant tissue capable of subsequent clonal propagation, whether by organogenesis or embryogenesis, may be transformed with a genetic construct of the present invention and a whole plant regenerated there from. The particular tissue chosen will vary depending on the clonal propagation systems available for, and best suited to, the particular species being transformed. Exemplary tissue targets include leaf disks, pollen, embryos, cotyledons, hypocotyls, megagametophytes, callus tissue, existing meristematic tissue (e.g., apical meristem, axillary buds, and root meristems), and induced meristem tissue (e.g., cotyledon meristem and hypocotyl meristem). The polynucleotide may be transiently or stably introduced into a host cell and may be maintained non-integrated, for example, as a plasmid. Alternatively, it may be integrated into the host genome. The resulting transformed plant cell may then be used to regenerate a transformed plant in a manner known to persons skilled in the art. Alternatively, a plant cell that cannot be regenerated into a plant may be chosen as host cell, i.e. the resulting transformed plant cell does not have the capacity to regenerate into a (whole) plant.

[0540] The transfer of foreign genes into the genome of a plant is called transformation. Transformation of plant species is now a fairly routine technique. Advantageously, any of several transformation methods may be used to introduce the gene of interest into a suitable ancestor cell. The methods described for the transformation and regeneration of plants from plant tissues or plant cells may be utilized for transient or for stable transformation. Transformation methods include the use of liposomes, electroporation, chemicals that increase free DNA uptake, injection of the DNA directly into the plant, particle gun bombardment, transformation using viruses or pollen and microprojection. Methods may be selected from the calcium/polyethylene glycol method for protoplasts (Krens, F. A. et al., (1982) Nature 296, 72-74; Negrutiu I et al. (1987) Plant Mol Biol 8: 363-373); electroporation of protoplasts (Shillito R. D. et al. (1985) Bio/Technol 3, 1099-1102); microinjection into plant material (Crossway A et al., (1986) Mol. Gen. Genet. 202: 179-185); DNA or RNA-coated particle bombardment (Klein T M et al., (1987) Nature 327: 70) infection with (non-integrative) viruses and the like. Transgenic plants, including transgenic crop plants, are preferably produced via Agrobacterium-mediated transformation. An advantageous transformation method is the transformation in planta. To this end, it is possible, for example, to allow the agrobacteria to act on plant seeds or to inoculate the plant meristem with agrobacteria. It has proved particularly expedient in accordance with the invention to allow a suspension of transformed agrobacteria to act on the intact plant or at least on the flower primordia. The plant is subsequently grown on until the seeds of the treated plant are obtained (Clough and Bent, Plant J. (1998) 16, 735-743). Methods for Agrobacterium-mediated transformation of rice include well known methods for rice transformation, such as those described in any of the following: European patent application EP 1198985 A1, Aldemita and Hodges (Planta 199: 612-617, 1996); Chan et al. (Plant Mol Biol 22 (3): 491-506, 1993), Hiei et al. (Plant J 6 (2): 271-282, 1994), which disclosures are incorporated by reference herein as if fully set forth. In the case of corn transformation, the preferred method is as described in either Ishida et al. (Nat. Biotechnol 14(6): 745-50, 1996) or Frame et al. (Plant Physiol 129(1): 13-22, 2002), which disclosures are incorporated by reference herein as if fully set forth. Said methods are further described by way of example in B. Jenes et al., Techniques for Gene Transfer, in: Transgenic Plants, Vol. 1, Engineering and Utilization, eds. S. D. Kung and R. Wu, Academic Press (1993) 128-143 and in Potrykus Annu. Rev. Plant Physiol. Plant Molec. Biol. 42 (1991) 205-225). The nucleic acids or the construct to be expressed is preferably cloned into a vector, which is suitable for transforming Agrobacterium tumefaciens, for example pBin19 (Bevan et al., Nucl. Acids Res. 12 (1984) 8711). Agrobacteria transformed by such a vector can then be used in known manner for the transformation of plants, such as plants used as a model, like Arabidopsis (Arabidopsis thaliana is within the scope of the present invention not considered as a crop plant), or crop plants such as, by way of example, tobacco plants, for example by immersing bruised leaves or chopped leaves in an agrobacterial solution and then culturing them in suitable media. The transformation of plants by means of Agrobacterium tumefaciens is described, for example, by Hofgen and Willmitzer in Nucl. Acid Res. (1988) 16, 9877 or is known inter alia from F. F. White, Vectors for Gene Transfer in Higher Plants; in Transgenic Plants, Vol. 1, Engineering and Utilization, eds. S. D. Kung and R. Wu, Academic Press, 1993, pp. 15-38.

[0541] In addition to the transformation of somatic cells, which then have to be regenerated into intact plants, it is also possible to transform the cells of plant meristems and in particular those cells which develop into gametes. In this case, the transformed gametes follow the natural plant development, giving rise to transgenic plants. Thus, for example, seeds of Arabidopsis are treated with agrobacteria and seeds are obtained from the developing plants of which a certain proportion is transformed and thus transgenic [Feldman, K A and Marks M D (1987). Mol Gen Genet 208:1-9; Feldmann K (1992). In: C Koncz, N-H Chua and J Shell, eds, Methods in Arabidopsis Research. Word Scientific, Singapore, pp. 274-289]. Alternative methods are based on the repeated removal of the inflorescences and incubation of the excision site in the center of the rosette with transformed agrobacteria, whereby transformed seeds can likewise be obtained at a later point in time (Chang (1994). Plant J. 5: 551-558; Katavic (1994). Mol Gen Genet, 245: 363-370). However, an especially effective method is the vacuum infiltration method with its modifications such as the “floral dip” method. In the case of vacuum infiltration of Arabidopsis, intact plants under reduced pressure are treated with an agrobacterial suspension [Bechthold, N (1993). C R Acad Sci Paris Life Sci, 316: 1194-1199], while in the case of the “floral dip” method the developing floral tissue is incubated briefly with a surfactant-treated agrobacterial suspension [Clough, S J and Bent A F (1998) The Plant J. 16, 735-743]. A certain proportion of transgenic seeds are harvested in both cases, and these seeds can be distinguished from non-transgenic seeds by growing under the above-described selective conditions. In addition the stable transformation of plastids is of advantages because plastids are inherited maternally is most crops reducing or eliminating the risk of transgene flow through pollen. The transformation of the chloroplast genome is generally achieved by a process which has been schematically displayed in Klaus et al., 2004 [Nature Biotechnology 22 (2), 225-229]. Briefly the sequences to be transformed are cloned together with a selectable marker gene between flanking sequences homologous to the chloroplast genome. These homologous flanking sequences direct site specific integration into the plastome. Plastidal transformation has been described for many different plant species and an overview is given in Bock (2001) Transgenic plastids in basic research and plant biotechnology. J Mol Biol. 2001 Sep. 21; 312 (3):425-38 or Maliga, P (2003) Progress towards commercialization of plastid transformation technology. Trends Biotechnol. 21, 20-28. Further biotechnological progress has recently been reported in form of marker free plastid transformants, which can be produced by a transient co-integrated maker gene (Klaus et al., 2004, Nature Biotechnology 22(2), 225-229).

[0542] The genetically modified plant cells can be regenerated via all methods with which the skilled worker is familiar. Suitable methods can be found in the abovementioned publications by S. D. Kung and R. Wu, Potrykus or Hofgen and Willmitzer. Alternatively, the genetically modified plant cells are non-regenerable into a whole plant.

[0543] Generally after transformation, plant cells or cell groupings are selected for the presence of one or more markers which are encoded by plant-expressible genes co-transferred with the gene of interest, following which the transformed material is regenerated into a whole plant. To select transformed plants, the plant material obtained in the transformation is, as a rule, subjected to selective conditions so that transformed plants can be distinguished from untransformed plants. For example, the seeds obtained in the above-described manner can be planted and, after an initial growing period, subjected to a suitable selection by spraying. A further possibility consists in growing the seeds, if appropriate after sterilization, on agar plates using a suitable selection agent so that only the transformed seeds can grow into plants. Alternatively, the transformed plants are screened for the presence of a selectable marker such as the ones described above.

[0544] Following DNA transfer and regeneration, putatively transformed plants may also be evaluated, for instance using Southern analysis, for the presence of the gene of interest, copy number and/or genomic organisation. Alternatively or additionally, expression levels of the newly introduced DNA may be monitored using Northern and/or Western analysis, both techniques being well known to persons having ordinary skill in the art.

[0545] The generated transformed plants may be propagated by a variety of means, such as by clonal propagation or classical breeding techniques. For example, a first generation (or T1) transformed plant may be selfed and homozygous second-generation (or T2) transformants selected, and the T2 plants may then further be propagated through classical breeding techniques. The generated transformed organisms may take a variety of forms. For example, they may be chimeras of transformed cells and non-transformed cells; clonal transformants (e.g., all cells transformed to contain the expression cassette); grafts of transformed and untransformed tissues (e.g., in plants, a transformed rootstock grafted to an untransformed scion).

[0546] T-DNA Activation Tagging

[0547] “T-DNA activation” tagging (Hayashi et al. Science (1992) 1350-1353), involves insertion of T-DNA, usually containing a promoter (may also be a translation enhancer or an intron), in the genomic region of the gene of interest or 10 kb up- or downstream of the coding region of a gene in a configuration such that the promoter directs expression of the targeted gene. Typically, regulation of expression of the targeted gene by its natural promoter is disrupted and the gene falls under the control of the newly introduced promoter. The promoter is typically embedded in a T-DNA. This T-DNA is randomly inserted into the plant genome, for example, through Agrobacterium infection and leads to modified expression of genes near the inserted T-DNA. The resulting transgenic plants show dominant phenotypes due to modified expression of genes close to the introduced promoter.

### TILLING

[0548] The term “TILLING” is an abbreviation of “Targeted Induced Local Lesions In Genomes” and refers to a mutagenesis technology useful to generate and/or identify nucleic acids encoding proteins with modified expression and/or activity. TILLING also allows selection of plants carrying such mutant variants. These mutant variants may exhibit modified expression, either in strength or in location or in timing (if the mutations affect the promoter for example). These mutant variants may exhibit higher activity than that exhibited by the gene in its natural form. TILLING combines high-density mutagenesis with high-throughput screening methods. The steps typically followed in TILLING are: (a) EMS mutagenesis (Redei G P and Koncz C (1992) In Methods in Arabidopsis Research, Koncz C, Chua N H, Schell J, eds. Singapore, World Scientific Publishing Co, pp. 16-82; Feldmann et al., (1994) In Meyerowitz E M, Somerville C R, eds, Arabidopsis. Cold Spring Harbor Laboratory Press, Cold Spring Harbor, N.Y., pp 137-172; Lightner J and Caspar T (1998) In J Martinez-Zapater, J Salinas, eds, Methods on Molecular Biology, Vol. 82. Humana Press, Totowa, N.J., pp 91-104); (b) DNA preparation and pooling of individuals; (c) PCR amplification of a region of interest; (d) denaturation and annealing to allow formation of heteroduplexes; (e) DHPLC, where the presence of a heteroduplex in a pool is detected as an extra peak in the chromatogram; (f) identification of the mutant individual; and (g) sequencing of the mutant PCR product. Methods for TILLING are well known in the art (McCallum et al., (2000) Nat Biotechnol 18: 455-457; reviewed by Stemple (2004) Nat Rev Genet 5(2): 145-50).

### Homologous Recombination

[0549] “Homologous recombination” allows introduction in a genome of a selected nucleic acid at a defined selected position. Homologous recombination is a standard technology used routinely in biological sciences for lower organisms such as yeast or the moss Physcomitrella. Methods for performing homologous recombination in plants have been described not only for model plants (Offring a et al. (1990) EMBO J 9(10): 3077-84) but also for crop plants, for example rice (Terada et al. (2002) Nat Biotech 20(10): 1030-4; lida and Terada (2004) Curr Opin Biotech 15(2): 132-8), and approaches exist that are generally applicable regardless of the target organism (Miller et al, Nature Biotechnol. 25, 778-785, 2007).

### Yield Related Trait(s)

[0550] A “Yield related trait” is a trait or feature which is related to plant yield. Yield-related traits may comprise one or more of the following non-limitative list of features: early flowering time, yield, biomass, seed yield, early vigour, greenness index, growth rate, agronomic traits, such as e.g. tolerance to submergence (which leads to yield in rice), Water Use Efficiency (WUE), Nitrogen Use Efficiency (NUE), etc.

[0551] Reference herein to enhanced yield-related traits, relative to of control plants is taken to mean one or more of an increase in early vigour and/or in biomass (weight) of one or more parts of a plant, which may include (i) aboveground parts and preferably aboveground harvestable parts and/or (ii) parts below ground and preferably harvestable below ground. In particular, such harvestable parts are seeds.

### Yield

[0552] The term “yield” in general means a measurable produce of economic value, typically related to a specified crop, to an area, and to a period of time. Individual plant parts directly contribute to yield based on their number, size and/or weight, or the actual yield is the yield per square meter for a crop and year, which is determined by dividing total production (includes both harvested and appraised production) by planted square meters.

[0553] The terms “yield” of a plant and “plant yield” are used interchangeably herein and are meant to refer to vegetative biomass such as root and/or shoot biomass, to reproductive organs, and/or to propagules such as seeds of that plant.

[0554] Flowers in maize are unisexual; male inflorescences (tassels) originate from the apical stem and female inflorescences (ears) arise from axillary bud apices. The female inflorescence produces pairs of spikelets on the surface of a central axis (cob). Each of the female spikelets encloses two fertile florets, one of them will usually mature into a maize kernel once fertilized. Hence a yield increase in maize may be manifested as one or more of the following: increase in the number of plants established per square meter, an increase in the number of ears per plant, an increase in the number of rows, number of kernels per row, kernel weight, thousand kernel weight, ear length/diameter, increase in the seed filling rate, which is the number of filled florets (i.e. florets containing seed) divided by the total number of florets and multiplied by 100), among others.

[0555] Inflorescences in rice plants are named panicles. The panicle bears spikelets, which are the basic units of the panicles, and which consist of a pedicel and a floret. The floret is borne on the pedicel and includes a flower that is covered by two protective glumes: a larger glume (the lemma) and a shorter glume (the palea). Hence, taking rice as an example, a yield increase may manifest itself as an increase in one or more of the following: number of plants per square meter, number of panicles per plant, panicle length, number of spikelets per panicle, number of flowers (or florets) per panicle; an increase in the seed filling rate which is the number of filled florets (i.e. florets containing seeds) divided by the total number of florets and multiplied by 100; an increase in thousand kernel weight, among others.

### Early Flowering Time

[0556] Plants having an “early flowering time” as used herein are plants which start to flower earlier than control plants. Hence this term refers to plants that show an earlier start of flowering. Flowering time of plants can be assessed by counting the number of days (“time to flower”) between sowing and the emergence of a first inflorescence. The “flowering time” of a plant can for instance be determined using the method as described in WO 2007/093444.

### Early Vigour

[0557] “Early vigour” refers to active healthy well-balanced growth especially during early stages of plant growth, and may result from increased plant fitness due to, for example, the plants being better adapted to their environment (i.e. optimizing the use of energy resources and partitioning between shoot and root). Plants having early vigour also show increased seedling survival and a better establishment of the crop, which often results in highly uniform fields (with the crop growing in uniform manner, i.e. with the majority of plants reaching the various stages of development at substantially the same time), and often better and higher yield. Therefore, early vigour may be determined by measuring various factors, such as thousand kernel weight, percentage germination, percentage emergence, seedling growth, seedling height, root length, root and shoot biomass and many more.

### Increased Growth Rate

[0558] The increased growth rate may be specific to one or more parts of a plant (including seeds), or may be throughout substantially the whole plant. Plants having an increased growth rate may have a shorter life cycle. The life cycle of a plant may be taken to mean the time needed to grow from a mature seed up to the stage where the plant has produced mature seeds, similar to the starting material. This life cycle may be influenced by factors such as speed of germination, early vigour, growth rate, greenness index, flowering time and speed of seed maturation. The increase in growth rate may take place at one or more stages in the life cycle of a plant or during substantially the whole plant life cycle. Increased growth rate during the early stages in the life cycle of a plant may reflect enhanced vigour. The increase in growth rate may alter the harvest cycle of a plant allowing plants to be sown later and/or harvested sooner than would otherwise be possible (a similar effect may be obtained with earlier flowering time). If the growth rate is sufficiently increased, it may allow for the further sowing of seeds of the same plant species (for example sowing and harvesting of rice plants followed by sowing and harvesting of further rice plants all within one conventional growing period). Similarly, if the growth rate is sufficiently increased, it may allow for the further sowing of seeds of different plants species (for example the sowing and harvesting of corn plants followed by, for example, the sowing and optional harvesting of soybean, potato or any other suitable plant). Harvesting additional times from the same rootstock in the case of some crop plants may also be possible. Altering the harvest cycle of a plant may lead to an increase in annual biomass production per square meter (due to an increase in the number of times (say in a year) that any particular plant may be grown and harvested). An increase in growth rate may also allow for the cultivation of transgenic plants in a wider geographical area than their wild-type counterparts, since the territorial limitations for growing a crop are often determined by adverse environmental conditions either at the time of planting (early season) or at the time of harvesting (late season). Such adverse conditions may be avoided if the harvest cycle is shortened. The growth rate may be determined by deriving various parameters from growth curves, such parameters may be: T-Mid (the time taken for plants to reach 50% of their maximal size) and T-90 (time taken for plants to reach 90% of their maximal size), amongst others.

### Stress Resistance

[0559] An increase in yield and/or growth rate occurs whether the plant is under non-stress conditions or whether the plant is exposed to various stresses compared to control plants. Plants typically respond to exposure to stress by growing more slowly. In conditions of severe stress, the plant may even stop growing altogether. Mild stress on the other hand is defined herein as being any stress to which a plant is exposed which does not result in the plant ceasing to grow altogether without the capacity to resume growth. Mild stress in the sense of the invention leads to a reduction in the growth of the stressed plants of less than 40%, 35%, 30% or 25%, more preferably less than 20% or 15% in comparison to the control plant under non-stress conditions. Due to advances in agricultural practices (irrigation, fertilization, pesticide treatments) severe stresses are not often encountered in cultivated crop plants. As a consequence, the compromised growth induced by mild stress is often an undesirable feature for agriculture. Abiotic stresses may be due to drought or excess water, anaerobic stress, salt stress, chemical toxicity, oxidative stress and hot, cold or freezing temperatures.

[0560] “Biotic stresses” are typically those stresses caused by pathogens, such as bacteria, viruses, fungi, nematodes and insects.

[0561] The “abiotic stress” may be an osmotic stress caused by a water stress, e.g. due to drought, salt stress, or freezing stress. Abiotic stress may also be an oxidative stress or a cold stress. “Freezing stress” is intended to refer to stress due to freezing temperatures, i.e. temperatures at which available water molecules freeze and turn into ice. “Cold stress”, also called “chilling stress”, is intended to refer to cold temperatures, e.g. temperatures below 10°, or preferably below 5° C., but at which water molecules do not freeze. As reported in Wang et al. (Planta (2003) 218: 1-14), abiotic stress leads to a series of morphological, physiological, biochemical and molecular changes that adversely affect plant growth and productivity. Drought, salinity, extreme temperatures and oxidative stress are known to be interconnected and may induce growth and cellular damage through similar mechanisms. Rabbani et al. (Plant Physiol (2003) 133: 1755-1767) describes a particularly high degree of “cross talk” between drought stress and high-salinity stress. For example, drought and/or salinisation are manifested primarily as osmotic stress, resulting in the disruption of homeostasis and ion distribution in the cell. Oxidative stress, which frequently accompanies high or low temperature, salinity or drought stress, may cause denaturing of functional and structural proteins. As a consequence, these diverse environmental stresses often activate similar cell signalling pathways and cellular responses, such as the production of stress proteins, up-regulation of anti-oxidants, accumulation of compatible solutes and growth arrest. The term “non-stress” conditions as used herein are those environmental conditions that allow optimal growth of plants. Persons skilled in the art are aware of normal soil conditions and climatic conditions for a given location. Plants with optimal growth conditions, (grown under non-stress conditions) typically yield in increasing order of preference at least 97%, 95%, 92%, 90%, 87%, 85%, 83%, 80%, 77% or 75% of the average production of such plant in a given environment. Average production may be calculated on harvest and/or season basis. Persons skilled in the art are aware of average yield productions of a crop.

[0562] In particular, the methods of the present invention may be performed under non-stress conditions. In an example, the methods of the present invention may be performed under non-stress conditions such as mild drought to give plants having increased yield relative to control plants.

[0563] In another embodiment, the methods of the present invention may be performed under stress conditions.

[0564] In an example, the methods of the present invention may be performed under stress conditions such as drought to give plants having increased yield relative to control plants.

[0565] In another example, the methods of the present invention may be performed under stress conditions such as nutrient deficiency to give plants having increased yield relative to control plants.

[0566] Nutrient deficiency may result from a lack of nutrients such as nitrogen, phosphates and other phosphorous-containing compounds, potassium, calcium, magnesium, manganese, iron and boron, amongst others.

[0567] In yet another example, the methods of the present invention may be performed under stress conditions such as salt stress to give plants having increased yield relative to control plants. The term salt stress is not restricted to common salt (NaCl), but may be any one or more of: NaCl, KCl, LiCl, MgCl₂, CaCl₂, amongst others.

[0568] In yet another example, the methods of the present invention may be performed under stress conditions such as cold stress or freezing stress to give plants having increased yield relative to control plants.

### Increase/Improve/Enhance

[0569] The terms “increase”, “improve” or “enhance” are interchangeable and shall mean in the sense of the application at least a 3%, 4%, 5%, 6%, 7%, 8%, 9% or 10%, preferably at least 15% or 20%, more preferably 25%, 30%, 35% or 40% more yield and/or growth in comparison to control plants as defined herein.

### Seed Yield

[0570] Increased seed yield may manifest itself as one or more of the following:
[0571] (a) an increase in seed biomass (total seed weight) which may be on an individual seed basis and/or per plant and/or per square meter;
[0572] (b) increased number of flowers per plant;
[0573] (c) increased number of seeds;
[0574] (d) increased seed filling rate (which is expressed as the ratio between the number of filled florets divided by the total number of florets);
[0575] (e) increased harvest index, which is expressed as a ratio of the yield of harvestable parts, such as seeds, divided by the biomass of aboveground plant parts; and
[0576] (f) increased thousand kernel weight (TKW), which is extrapolated from the number of seeds counted and their total weight. An increased TKW may result from an increased seed size and/or seed weight, and may also result from an increase in embryo and/or endosperm size.

[0577] The terms “filled florets” and “filled seeds” may be considered synonyms.

[0578] An increase in seed yield may also be manifested as an increase in seed size and/or seed volume. Furthermore, an increase in seed yield may also manifest itself as an increase in seed area and/or seed length and/or seed width and/or seed perimeter.

### Greenness Index

[0579] The “greenness index” as used herein is calculated from digital images of plants. For each pixel belonging to the plant object on the image, the ratio of the green value versus the red value (in the RGB model for encoding color) is calculated. The greenness index is expressed as the percentage of pixels for which the green-to-red ratio exceeds a given threshold. Under normal growth conditions, under salt stress growth conditions, and under reduced nutrient availability growth conditions, the greenness index of plants is measured in the last imaging before flowering. In contrast, under drought stress growth conditions, the greenness index of plants is measured in the first imaging after drought.

### Biomass

[0580] The term “biomass” as used herein is intended to refer to the total weight of a plant. Within the definition of biomass, a distinction may be made between the biomass of one or more parts of a plant, which may include any one or more of the following:
[0581] aboveground parts such as but not limited to shoot biomass, seed biomass, leaf biomass, etc.;
[0582] aboveground harvestable parts such as but not limited to shoot biomass, seed biomass, leaf biomass, etc.;
[0583] parts below ground, such as but not limited to root biomass, tubers, bulbs, etc.;
[0584] harvestable parts below ground, such as but not limited to root biomass, tubers, bulbs, etc.;
[0585] harvestable parts partially below ground such as but not limited to beets and other hypocotyl areas of a plant, rhizomes, stolons or creeping rootstalks;
[0586] vegetative biomass such as root biomass, shoot biomass, etc.;
[0587] reproductive organs; and
[0588] propagules such as seed.

### Marker Assisted Breeding

[0589] Such breeding programmes sometimes require introduction of allelic variation by mutagenic treatment of the plants, using for example EMS mutagenesis; alternatively, the programme may start with a collection of allelic variants of so called “natural” origin caused unintentionally. Identification of allelic variants then takes place, for example, by PCR. This is followed by a step for selection of superior allelic variants of the sequence in question and which give increased yield. Selection is typically carried out by monitoring growth performance of plants containing different allelic variants of the sequence in question. Growth performance may be monitored in a greenhouse or in the field. Further optional steps include crossing plants in which the superior allelic variant was identified with another plant. This could be used, for example, to make a combination of interesting phenotypic features.

### Use as Probes in (Gene Mapping)

[0590] Use of nucleic acids encoding the protein of interest for genetically and physically mapping the genes requires only a nucleic acid sequence of at least 15 nucleotides in length. These nucleic acids may be used as restriction fragment length polymorphism (RFLP) markers. Southern blots (Sambrook J, Fritsch E F and Maniatis T (1989) Molecular Cloning, A Laboratory Manual) of restriction-digested plant genomic DNA may be probed with the nucleic acids encoding the protein of interest. The resulting banding patterns may then be subjected to genetic analyses using computer programs such as MapMaker (Lander et al. (1987) Genomics 1: 174-181) in order to construct a genetic map. In addition, the nucleic acids may be used to probe Southern blots containing restriction endonuclease-treated genomic DNAs of a set of individuals representing parent and progeny of a defined genetic cross. Segregation of the DNA polymorphisms is noted and used to calculate the position of the nucleic acid encoding the protein of interest in the genetic map previously obtained using this population (Botstein et al. (1980) Am. J. Hum. Genet. 32:314-331).

[0591] The production and use of plant gene-derived probes for use in genetic mapping is described in Bernatzky and Tanksley (1986) Plant Mol. Biol. Reporter 4: 37-41. Numerous publications describe genetic mapping of specific cDNA clones using the methodology outlined above or variations thereof. For example, F2 intercross populations, backcross populations, randomly mated populations, near isogenic lines, and other sets of individuals may be used for mapping. Such methodologies are well known to those skilled in the art.

[0592] The nucleic acid probes may also be used for physical mapping (i.e., placement of sequences on physical maps; see Hoheisel et al. In: Non-mammalian Genomic Analysis: A Practical Guide, Academic press 1996, pp. 319-346, and references cited therein).

[0593] In another embodiment, the nucleic acid probes may be used in direct fluorescence in situ hybridisation (FISH) mapping (Trask (1991) Trends Genet. 7:149-154). Although current methods of FISH mapping favour use of large clones (several kb to several hundred kb; see Laan et al. (1995) Genome Res. 5:13-20), improvements in sensitivity may allow performance of FISH mapping using shorter probes.

[0594] A variety of nucleic acid amplification-based methods for genetic and physical mapping may be carried out using the nucleic acids. Examples include allele-specific amplification (Kazazian (1989) J. Lab. Clin. Med 11:95-96), polymorphism of PCR-amplified fragments (CAPS; Sheffield et al. (1993) Genomics 16:325-332), allele-specific ligation (Landegren et al. (1988) Science 241:1077-1080), nucleotide extension reactions (Sokolov (1990) Nucleic Acid Res. 18:3671), Radiation Hybrid Mapping (Walter et al. (1997) Nat. Genet. 7:22-28) and Happy Mapping (Dear and Cook (1989) Nucleic Acid Res. 17:6795-6807). For these methods, the sequence of a nucleic acid is used to design and produce primer pairs for use in the amplification reaction or in primer extension reactions. The design of such primers is well known to those skilled in the art. In methods employing PCR-based genetic mapping, it may be necessary to identify DNA sequence differences between the parents of the mapping cross in the region corresponding to the instant nucleic acid sequence. This, however, is generally not necessary for mapping methods.

### Plant

[0595] The term “plant” as used herein encompasses whole plants, ancestors and progeny of the plants and plant parts, including seeds, shoots, stems, leaves, roots (including tubers), flowers, and tissues and organs, wherein each of the aforementioned comprise the gene/nucleic acid of interest. The term “plant” also encompasses plant cells, suspension cultures, callus tissue, embryos, meristematic regions, gametophytes, sporophytes, pollen and microspores, again wherein each of the aforementioned comprises the gene/nucleic acid of interest.

[0596] Plants that are particularly useful in the methods of the invention include all plants which belong to the superfamily Viridiplantae, in particular monocotyledonous and dicotyledonous plants including fodder or forage legumes, ornamental plants, food crops, trees or shrubs selected from the list comprising Acer spp., Actinidia spp., Abelmoschus spp., Agave sisalana, Agropyron spp., Agrostis stolonifera, Allium spp., Amaranthus spp., Ammophila arenaria, Ananas comosus, Annona spp., Apium graveolens, Arachis spp, Artocarpus spp., Asparagus officinalis, Avena spp. (e.g. Avena sativa, Avena fatua, Avena byzantina, Avena fatua var. sativa, Avena hybrida), Averrhoa carambola, Bambusa sp., Benincasa hispida, Bertholletia excelsea, Beta vulgaris, Brassica spp. (e.g. Brassica napus, Brassica rapa ssp. [canola, oilseed rape, turnip rape]), Cadaba farinosa, Camellia sinensis, Canna indica, Cannabis sativa, Capsicum spp., Carex elata, Carica papaya, Carissa macrocarpa, Carya spp., Carthamus tinctorius, Castanea spp., Ceiba pentandra, Cichorium endivia, Cinnamomum spp., Citrullus lanatus, Citrus spp., Cocos spp., Coffea spp., Colocasia esculenta, Cola spp., Corchorus sp., Coriandrum sativum, Corylus spp., Crataegus spp., Crocus sativus, Cucurbita spp., Cucumis spp., Cynara spp., Daucus carota, Desmodium spp., Dimocarpus longan, Dioscorea spp., Diospyros spp., Echinochloa spp., Elaeis (e.g. Elaeis guineensis, Elaeis oleifera), Eleusine coracana, Eragrostis tef, Erianthus sp., Eriobotrya japonica, Eucalyptus sp., Eugenia uniflora, Fagopyrum spp., Fagus spp., Festuca arundinacea, Ficus carica, Fortunella spp., Fragaria spp., Ginkgo biloba, Glycine spp. (e.g. Glycine max, Soja hispida or Soja max), Gossypium hirsutum, Helianthus spp. (e.g. Helianthus annuus), Hemerocallis fulva, Hibiscus spp., Hordeum spp. (e.g. Hordeum vulgare), Ipomoea batatas, Juglans spp., Lactuca sativa, Lathyrus spp., Lens culinaris, Linum usitatissimum, Litchi chinensis, Lotus spp., Luffa acutangula, Lupinus spp., Luzula sylvatica, Lycopersicon spp. (e.g. Lycopersicon esculentum, Lycopersicon lycopersicum, Lycopersicon pyriforme), Macrotyloma spp., Malus spp., Malpighia emarginata, Mammea americana, Mangifera indica, Manihot spp., Manilkara zapota, Medicago sativa, Melilotus spp., Mentha spp., Miscanthus sinensis, Momordica spp., Morus nigra, Musa spp., Nicotiana spp., Olea spp., Opuntia spp., Ornithopus spp., Oryza spp. (e.g. Oryza sativa, Oryza latifolia), Panicum miliaceum, Panicum virgatum, Passiflora edulis, Pastinaca sativa, Pennisetum sp., Persea spp., Petroselinum crispum, Phalaris arundinacea, Phaseolus spp., Phleum pratense, Phoenix spp., Phragmites australis, Physalis spp., Pinus spp., Pistacia vera, Pisum spp., Poa spp., Populus spp., Prosopis spp., Prunus spp., Psidium spp., Punica granatum, Pyrus communis, Quercus spp., Raphanus sativus, Rheum rhabarbarum, Ribes spp., Ricinus communis, Rubus spp., Saccharum spp., Salix sp., Sambucus spp., Secale cereale, Sesamum spp., Sinapis sp., Solanum spp. (e.g. Solanum tuberosum, Solanum integrifolium or Solanum lycopersicum), Sorghum bicolor, Spinacia spp., Syzygium spp., Tagetes spp., Tamarindus indica, Theobroma cacao, Trifolium spp., Tripsacum dactyloides, Triticosecale rimpaui, Triticum spp. (e.g. Triticum aestivum, Triticum durum, Triticum turgidum, Triticum hybernum, Triticum macha, Triticum sativum, Triticum monococcum or Triticum vulgare), Tropaeolum minus, Tropaeolum majus, Vaccinium spp., Vicia spp., Vigna spp., Viola odorata, Vitis spp., Zea mays, Zizania palustris, Ziziphus spp., amongst others.

### Control Plant(s)

[0597] The choice of suitable control plants is a routine part of an experimental setup and may include corresponding wild type plants or corresponding plants without the gene of interest. The control plant is typically of the same plant species or even of the same variety as the plant to be assessed. The control plant may also be a nullizygote of the plant to be assessed. Nullizygotes (or null control plants) are individuals missing the transgene by segregation. Further, control plants are grown under equal growing conditions to the growing conditions of the plants of the invention, i.e. in the vicinity of, and simultaneously with, the plants of the invention. A “control plant” as used herein refers not only to whole plants, but also to plant parts, including seeds and seed parts.

### DESCRIPTION OF FIGURES

[0598] The present invention will now be described with reference to the following figures in which:

[0599] FIG. 1 represents the binary vector used for increased expression in Oryza sativa of a WAK-like-encoding nucleic acid under the control of a rice GOS2 promoter (pGOS2).

[0600] FIG. 2 represents an alignment of a CDKB-RKA polypeptide represented by SEQ ID NO: 318 with a CDKB polypeptide (CDKB1,2) from Arabidospsis thaliana (AT2G38620.2; SEQ ID NO: 320) with indication of conserved domains.

[0601] FIG. 3 represents a multiple alignment of various full length CDKB polypeptides. The asterisks indicate identical amino acids among the various protein sequences, colons represent highly conserved amino acid substitutions, and the dots represent less conserved amino acid substitution; on other positions there is no sequence conservation. These alignments can be used for defining further motifs or signature sequences, when using conserved amino acids. A conserved cyclin binding domain is represented with a black box.

[0602] FIG. 4 represents the binary vector used for increased expression in Oryza sativa of a CDKB-RKA-encoding nucleic acid as defined herein under the control of a suitable promoter.

[0603] FIG. 5 represents the domain structure of SEQ ID NO: 407 with conserved motifs 2 to 7 and bHLH domain (bold and underlined).

[0604] FIG. 6 represents a multiple alignment of various UPA20-like polypeptides. The aligned sequences have the SEQ ID NOs as described in the legend of FIG. 7. These alignments can be used for defining further motifs or signature sequences, when using conserved amino acids. The bHLH domain is indicated with a box.

[0605] FIG. 7 shows the MATGAT table of Example 3. The represented polypeptides correspond to the following legend:

1. P. trichocarpa 575437; 2. A. lyrata 472791; 3. A. lyrata 476021; 4. A. lyrata 491205; 5. A. lyrata 494918; 6. A. lyrata 495154; 7. A. thaliana AT1G26260.1; 8. A. thaliana AT1G68920.1; 9. A. thaliana AT3G07340.1; 10. A. thaliana AT5G48560.1; 11. A. thaliana AT5G50915.1; 12. Aquilegia sp TC24120; 13. Aquilegia sp TC24680; 14. Aquilegia sp TC26724; 15. B. napus TC73386; 16. C. annuum NP13055023; 17. C. annuum TC15396; 18. C. sinensis TC686; 19. G. hirsutum TC144761; 20. G. max Glyma01g09400.1; 21. G. max Glyma02g13860.1; 22. G. max Glyma03g21770.1; 23. G. max Glyma04g37690.1; 24. G. max Glyma05g38450.1; 25. G. max Glyma06g17420.1; 26. G. max Glyma08g46040.1; 27. G. max Glyma18g32560.1; 28. G. max GM06MC18997 59691073@18643; 29. G. raimondii TC6315; 30. G. raimondii TC9358; 31. H. tuberosus TA2737 4233; 32. M. domestica TC28668; 33. M. truncatula AC150842 12.5; 34. M. truncatula AC171266 17.4; 35. N. tabacum FG645212; 36. O. sativa LOC Os04g28280.1; 37. O. sativa LOC Os05g01256.1; 38. O. sativa LOC Os06g16400.1; 39. O. sativa LOC Os08g41320.1; 40. O. sativa LOC Os08g42470.1; 41. O. sativa LOC Os09g32510.4; 42. O. sativa LOC Os09g33580.1; 43. P. hybrida TC3261; 44. P. persica TC11169; 45. P. trichocarpa 553223; 46. P. trichocarpa 572918; 47. P. trichocarpa 773249; 48. P. virgatum TC28308; 49. P. vulgaris TC12782; 50. R. communis TA2848 3988; 51. S. bicolor Sb02g029530.1; 52. S. bicolor Sb07g025920.1; 53. S. lycopersicum TC196509; 54. S. lycopersicum TC215759; 55. S. officinarum TC78398; 56. S. tuberosum TC168229; 57. T. aestivum TC301717; 58. Poptr TA1; 59. Triphysaria sp TC7138; 60. V. vinifera GSVIVT00014998001; 61. Z. mays TC460846; 62. Z. mays TC476562; 63. Z. mays TC511518; 64. Z. mays ZM07MC24807 BFb0298G14@24734; 65. Z. mays ZM07MC32776 BFb0337M22@32678; 66. Z. officinale TA5989 94328

[0606] FIG. 8 represents the binary vector used for increased expression in Oryza sativa of a UPA20-like-encoding nucleic acid under the control of a rice GOS2 promoter (pGOS2).

[0607] FIG. 9 shows a phylogenetic tree of a number of UPA20-like polypeptides.

### EXAMPLES

[0608] The present invention will now be described with reference to the following examples, which are by way of illustration only. The following examples are not intended to limit the scope of the invention. Unless otherwise indicated, the present invention employs conventional techniques and methods of plant biology, molecular biology, bioinformatics and plant breedings.

[0609] DNA manipulation: unless otherwise stated, recombinant DNA techniques are performed according to standard protocols described in (Sambrook (2001) Molecular Cloning: a laboratory manual, 3rd Edition Cold Spring Harbor Laboratory Press, CSH, New York) or in Volumes 1 and 2 of Ausubel et al. (1994), Current Protocols in Molecular Biology, Current Protocols. Standard materials and methods for plant molecular work are described in Plant Molecular Biology Labfax (1993) by R. D. D. Croy, published by BIOS Scientific Publications Ltd (UK) and Blackwell Scientific Publications (UK).

### Example 1

### Identification of Sequences Related to the Nucleic Acid Sequence Used in the Methods of Intervention

### 1. WAK-Like Polypeptides

[0610] Sequences (full length cDNA, ESTs or genomic) related to SEQ ID NO: 1 and SEQ ID NO: 2 were identified amongst those maintained in the Entrez Nucleotides database at the National Center for Biotechnology Information (NCBI) using database sequence search tools, such as the Basic Local Alignment Tool (BLAST) (Altschul et al. (1990) J. Mol. Biol. 215:403-410; and Altschul et al. (1997) Nucleic Acids Res. 25:3389-3402). The program is used to find regions of local similarity between sequences by comparing nucleic acid or polypeptide sequences to sequence databases and by calculating the statistical significance of matches. For example, the polypeptide encoded by the nucleic acid of SEQ ID NO: 1 was used for the TBLASTN algorithm, with default settings and the filter to ignore low complexity sequences set off. The output of the analysis was viewed by pairwise comparison, and ranked according to the probability score (E-value), where the score reflect the probability that a particular alignment occurs by chance (the lower the E-value, the more significant the hit). In addition to E-values, comparisons were also scored by percentage identity. Percentage identity refers to the number of identical nucleotides (or amino acids) between the two compared nucleic acid (or polypeptide) sequences over a particular length. In some instances, the default parameters may be adjusted to modify the stringency of the search. For example the E-value may be increased to show less stringent matches. This way, short nearly exact matches may be identified.

[0611] Table A1 provides a list of nucleic acid sequences related to SEQ ID NO: 1 and SEQ ID NO: 2.

TABLE A1
Examples of WAK-like nucleic acids and polypeptides:

| | Nucleic acid | Protein |
|---|---|---|
| Plant Source | SEQ ID NO: | SEQ ID NO: |
| Oryza sativa | 1 | 2 |
| Oryza sativa | 3 | 4 |
| Oryza sativa | 5 | 6 |
| Oryza sativa | 7 | 8 |
| Oryza sativa | 9 | 10 |
| Oryza sativa | 11 | 12 |
| Oryza sativa | 13 | 14 |
| Oryza sativa | 15 | 16 |
| Oryza sativa | 17 | 18 |
| Oryza sativa | 19 | 20 |
| Oryza sativa | 21 | 22 |
| Oryza sativa | 23 | 24 |
| Oryza sativa | 25 | 26 |
| Oryza sativa | 27 | 28 |
| Oryza sativa | 29 | 30 |
| Oryza sativa | 31 | 32 |
| Oryza sativa | 33 | 34 |
| Oryza sativa | 35 | 36 |
| Oryza sativa | 37 | 38 |
| Oryza sativa | 39 | 40 |
| Oryza sativa | 41 | 42 |
| Oryza sativa | 43 | 44 |
| Oryza sativa | 45 | 46 |
| Oryza sativa | 47 | 48 |
| Oryza sativa | 49 | 50 |
| Oryza sativa | 51 | 52 |
| Oryza sativa | 53 | 54 |
| Oryza sativa | 55 | 56 |
| Oryza sativa | 57 | 58 |
| Oryza sativa | 59 | 60 |
| Oryza sativa | 61 | 62 |
| Oryza sativa | 63 | 64 |
| Oryza sativa | 65 | 66 |
| Oryza sativa | 67 | 68 |
| Oryza sativa | 69 | 70 |
| Oryza sativa | 71 | 72 |
| Oryza sativa | 73 | 74 |
| Oryza sativa | 75 | 76 |
| Oryza sativa | 77 | 78 |
| Oryza sativa | 79 | 80 |
| Oryza sativa | 81 | 82 |
| Oryza sativa | 83 | 84 |
| Oryza sativa | 85 | 86 |
| Oryza sativa | 87 | 88 |
| Oryza sativa | 89 | 90 |
| Oryza sativa | 91 | 92 |
| Oryza sativa | 93 | 94 |
| Oryza sativa | 95 | 96 |
| Oryza sativa | 97 | 98 |
| Oryza sativa | 99 | 100 |
| Oryza sativa | 101 | 102 |
| Oryza sativa | 103 | 104 |
| Oryza sativa | 105 | 106 |
| Oryza sativa | 107 | 108 |
| Oryza sativa | 109 | 110 |
| Oryza sativa | 111 | 112 |
| Oryza sativa | 113 | 114 |
| Oryza sativa | 115 | 116 |
| Oryza sativa | 117 | 118 |
| Oryza sativa | 119 | 120 |
| Oryza sativa | 121 | 122 |
| Oryza sativa | 123 | 124 |
| Oryza sativa | 125 | 126 |
| Oryza sativa | 127 | 128 |
| Oryza sativa | 129 | 130 |
| Oryza sativa | 131 | 132 |
| Oryza sativa | 133 | 134 |
| Oryza sativa | 135 | 136 |
| Oryza sativa | 137 | 138 |
| Oryza sativa | 139 | 140 |
| Oryza sativa | 141 | 142 |
| Oryza sativa | 143 | 144 |
| Oryza sativa | 145 | 146 |
| Oryza sativa | 147 | 148 |
| Oryza sativa | 149 | 150 |
| Oryza sativa | 151 | 152 |
| Oryza sativa | 153 | 154 |
| Oryza sativa | 155 | 156 |
| Oryza sativa | 157 | 158 |
| Oryza sativa | 159 | 160 |
| Oryza sativa | 161 | 162 |
| Oryza sativa | 163 | 164 |
| Oryza sativa | 165 | 166 |
| Oryza sativa | 167 | 168 |
| Oryza sativa | 169 | 170 |
| Oryza sativa | 171 | 172 |
| Oryza sativa | 173 | 174 |
| Oryza sativa | 175 | 176 |
| Oryza sativa | 177 | 178 |
| Oryza sativa | 179 | 180 |
| Oryza sativa | 181 | 182 |
| Oryza sativa | 183 | 184 |
| Oryza sativa | 185 | 186 |
| Oryza sativa | 187 | 188 |
| Oryza sativa | 189 | 190 |
| Oryza sativa | 191 | 192 |
| Oryza sativa | 193 | 194 |
| Oryza sativa | 195 | 196 |
| Oryza sativa | 197 | 198 |
| Oryza sativa | 199 | 200 |
| Oryza sativa | 201 | 202 |
| Oryza sativa | 203 | 204 |
| Oryza sativa | 205 | 206 |
| Oryza sativa | 207 | 208 |
| Oryza sativa | 209 | 210 |
| Oryza sativa | 211 | 212 |
| Oryza sativa | 213 | 214 |
| Oryza sativa | 215 | 216 |
| Oryza sativa | 217 | 218 |
| Oryza sativa | 219 | 220 |
| Oryza sativa | 221 | 222 |
| Oryza sativa | 223 | 224 |
| Oryza sativa | 225 | 226 |
| Oryza sativa | 227 | 228 |
| Oryza sativa | 229 | 230 |
| Oryza sativa | 231 | 232 |
| Oryza sativa | 233 | 234 |
| Oryza sativa | 235 | 236 |
| Oryza sativa | 237 | 238 |
| Oryza sativa | 239 | 240 |
| Oryza sativa | 241 | 242 |
| Oryza sativa | 243 | 244 |
| Oryza sativa | 245 | 246 |
| Oryza sativa | 247 | 248 |
| Oryza sativa | 249 | 250 |
| Oryza sativa | 251 | 252 |
| Oryza sativa | 253 | 254 |
| Oryza sativa | 255 | 256 |
| Oryza sativa | 257 | 258 |
| Oryza sativa | 259 | 260 |
| Oryza sativa | 261 | 262 |
| Oryza sativa | 263 | 264 |
| Oryza sativa | 265 | 266 |
| Oryza sativa | 267 | 268 |
| Oryza sativa | 269 | 270 |
| Arabidopsis thaliana | 271 | 272 |
| Arabidopsis thaliana | 273 | 274 |
| Arabidopsis thaliana | 275 | 276 |
| Arabidopsis thaliana | 277 | 278 |
| Arabidopsis thaliana | 279 | 280 |
| Arabidopsis thaliana | 281 | 282 |
| Arabidopsis thaliana | 283 | 284 |
| Arabidopsis thaliana | 285 | 286 |
| Arabidopsis thaliana | 287 | 288 |
| Arabidopsis thaliana | 289 | 290 |
| Arabidopsis thaliana | 291 | 292 |
| Arabidopsis thaliana | 293 | 294 |
| Arabidopsis thaliana | 295 | 296 |
| Arabidopsis thaliana | 297 | 298 |
| Arabidopsis thaliana | 299 | 300 |
| Arabidopsis thaliana | 301 | 302 |

### 2. CDKB-RKA Polypetpides

[0612] The nucleic acid molecule represented by SEQ ID NO: 319 and encoding a B-type CDK (CDKB) polypeptide represented by SEQ ID NO: 320 is an example of a full length CDKB polypeptide that has catalytic kinase activity.

[0613] Starting from this sequence, other sequences (full length cDNA, ESTs or genomic) related to SEQ ID NO: 319 and SEQ ID NO: 320 were identified amongst those maintained in the Entrez Nucleotides database at the National Center for Biotechnology Information (NCBI) using database sequence search tools, such as the Basic Local Alignment Tool (BLAST) (Altschul et al. (1990) J. Mol. Biol. 215:403-410; and Altschul et al. (1997) Nucleic Acids Res. 25:3389-3402). The program is used to find regions of local similarity between sequences by comparing nucleic acid or polypeptide sequences to sequence databases and by calculating the statistical significance of matches. For example, the polypeptide encoded by the nucleic acid of SEQ ID NO: 319 was used for the TBLASTN algorithm, with default settings and the filter to ignore low complexity sequences set off. The output of the analysis was viewed by pairwise comparison, and ranked according to the probability score (E-value), where the score reflect the probability that a particular alignment occurs by chance (the lower the E-value, the more significant the hit). In addition to E-values, comparisons were also scored by percentage identity. Percentage identity refers to the number of identical nucleotides (or amino acids) between the two compared nucleic acid (or polypeptide) sequences over a particular length. In some instances, the default parameters may be adjusted to modify the stringency of the search. For example the E-value may be increased to show less stringent matches. This way, short nearly exact matches may be identified.

[0614] Table A2 provides a list of nucleic acid sequences related to and including SEQ ID NO: 319 and SEQ ID NO: 320.

TABLE A2
Examples of B-type nucleic acids and polypeptides:

| | Nucleic acid | amino acid |
|---|---|---|
| plant source | sequence | sequence |
| A. thaliana_AT2G38620.2#1 | 319 | 320 |
| A. thaliana_AT3G54180.1#1 | 321 | 322 |
| A. thaliana_AT2G38620.1#1 | 323 | 324 |
| A. thaliana_AT1G76540.1#1 | 325 | 326 |
| A. thaliana_AT1G20930.1#1 | 327 | 328 |
| G. max_Glyma14g39760.1#1 | 329 | 330 |
| G. max_Glyma07g02400.1#1 | 331 | 332 |
| G. max_Glyma07g07640.1#1 | 333 | 334 |
| G. max_Glyma09g08250.1#1 | 335 | 336 |
| G. max_Glyma17g38210.1#1 | 337 | 338 |
| H. annuus_CD855729#1 | 339 | 340 |
| H. vulgare_TC160457#1 | 341 | 342 |
| H. vulgare_TC172640#1 | 343 | 344 |
| M. truncatula_TC115190#1 | 345 | 346 |
| M. truncatula_TC117212#1 | 347 | 348 |
| O. sativa_LOC_Os01g67160.1#1 | 349 | 350 |
| O. sativa_LOC_Os08g40170.1#1 | 351 | 352 |
| P. patens_TC41028#1 | 353 | 354 |
| P. patens_NP13120379#1 | 355 | 356 |
| P. patens_NP13127560#1 | 357 | 358 |
| P. patens_TC43373#1 | 359 | 360 |
| P. patens_TC35664#1 | 361 | 362 |
| P. patens_TC47562#1 | 363 | 364 |
| P. trichocarpa_scaff_28.331#1 | 365 | 366 |
| P. trichocarpa_scaff_XVI.1376#1 | 367 | 368 |
| P. trichocarpa_scaff_II.31#1 | 369 | 370 |
| P. trichocarpa_scaff_3712.1#1 | 371 | 372 |
| S. lycopersicum_TC198540#1 | 373 | 374 |
| S. lycopersicum_TC205060#1 | 375 | 376 |
| T. aestivum_TC283074#1 | 377 | 378 |
| T. aestivum_TC290551#1 | 379 | 380 |
| T. aestivum_TC282781#1 | 381 | 382 |
| Z. mays_c62195783gm030403@12303#1 | 383 | 384 |
| M. sativa_P93321 | 385 | 386 |
| R. communis_XP_002519974.1 | 387 | 388 |
| N. tobacco_AAG01532.1 | 389 | 390 |
| S. esculentum_CAC15503.1 | 391 | 392 |
| Lotus japonicus | 393 | 394 |
| V. vitis_XP002266623.1 | 395 | 396 |
| Anthirinum_CAA66235.1 | 397 | 398 |
| C. rubrum_CAC17703.1 | 399 | 400 |
| S. bicolor_XP_002441781.1 | 401 | 402 |

[0615] Polypeptides related to SEQ ID NO: 320, such as those represented in Table A2 above, may be used in the present invention, provided that the polypeptides sequences have reduced or preferably lack catalytic kinase activity. Hence, starting from sequences such as those listed in Table A2, CDKB-RKA polypeptides according to the invention, can be designed, for instance by introducing one or more mutations in said polypeptides, and preferably in the catalytic kinase domain of said polypeptides, or by partially or substantially completely truncating the catalytic kinase domain from the CDKB polypeptide.

### 3. UPA20-Like Polypeptides

[0616] Sequences (full length cDNA, ESTs or genomic) related to SEQ ID NO: 406 and SEQ ID NO: 407 were identified amongst those maintained in the Entrez Nucleotides database at the National Center for Biotechnology Information (NCBI) using database sequence search tools, such as the Basic Local Alignment Tool (BLAST) (Altschul et al. (1990) J. Mol. Biol. 215:403-410; and Altschul et al. (1997) Nucleic Acids Res. 25:3389-3402). The program is used to find regions of local similarity between sequences by comparing nucleic acid or polypeptide sequences to sequence databases and by calculating the statistical significance of matches. For example, the polypeptide encoded by the nucleic acid of SEQ ID NO: 406 was used for the TBLASTN algorithm, with default settings and the filter to ignore low complexity sequences set off. The output of the analysis was viewed by pairwise comparison, and ranked according to the probability score (E-value), where the score reflect the probability that a particular alignment occurs by chance (the lower the E-value, the more significant the hit). In addition to E-values, comparisons were also scored by percentage identity. Percentage identity refers to the number of identical nucleotides (or amino acids) between the two compared nucleic acid (or polypeptide) sequences over a particular length. In some instances, the default parameters may be adjusted to modify the stringency of the search. For example the E-value may be increased to show less stringent matches. This way, short nearly exact matches may be identified.

[0617] Table A3 provides SEQ ID NO: 406 and 407 and a list of nucleic acid sequences related to SEQ ID NO: 406 and SEQ ID NO: 407.

TABLE A3
Examples of UPA20-like nucleic acids and polypeptides:

| | Nucleic acid | Amino acid | |
|---|---|---|---|
| Plant Source | SEQ ID NO | SEQ ID NO | Clade |
| P. trichocarpa_575437#1 | 406 | 407 | A |
| A. lyrata_495154#1 | 408 | 409 | A |
| A. thaliana_AT5G50915.1#1 | 410 | 411 | A |
| Aquilegia_sp_TC24680#1 | 412 | 413 | A |
| B. napus_TC73386#1 | 414 | 415 | A |
| C. annuum_NP13055023#1 | 416 | 417 | A |
| C. sinensis_TC686#1 | 418 | 419 | A |
| G. max_Glyma04g37690.1#1 | 420 | 421 | A |
| G. max_Glyma05g38450.1#1 | 422 | 423 | A |
| G. max_Glyma06g17420.1#1 | 424 | 425 | A |
| G. raimondii_TC6315#1 | 426 | 427 | A |
| M. domestica_TC28668#1 | 428 | 429 | A |
| N. tabacum_FG645212#1 | 430 | 431 | A |
| O. sativa_LOC_Os05g01256.1#1 | 432 | 433 | A |
| O. sativa_LOC_Os08g42470.1#1 | 434 | 435 | A |
| O. sativa_LOC_Os09g33580.1#1 | 436 | 437 | A |
| P. hybrida_TC3261#1 | 438 | 439 | A |
| P. trichocarpa_773249#1 | 440 | 441 | A |
| P. virgatum_TC28308#1 | 442 | 443 | A |
| S. bicolor_Sb02g029530.1#1 | 444 | 445 | A |
| S. bicolor_Sb07g025920.1#1 | 446 | 447 | A |
| S. officinarum_TC78398#1 | 448 | 449 | A |
| T. aestivum_TC301717#1 | 450 | 451 | A |
| Z. mays_TC460846#1 | 452 | 453 | A |
| Z. mays_TC476562#1 | 454 | 455 | A |
| Z. mays_TC511518#1 | 456 | 457 | A |
| Z. mays_ZM07MC24807_BFb0298G14@24734#1 | 458 | 459 | A |
| Z. mays_ZM07MC32776_BFb0337M22@32678#1 | 460 | 461 | A |
| A. lyrata_472791#1 | 462 | 463 | B |
| A. lyrata_476021#1 | 464 | 465 | B |
| A. lyrata_491205#1 | 466 | 467 | B |
| A. lyrata_494918#1 | 468 | 469 | B |
| A. thaliana_AT1G26260.1#1 | 470 | 471 | B |
| A. thaliana_AT1G68920.1#1 | 472 | 473 | B |
| A. thaliana_AT3G07340.1#1 | 474 | 475 | B |
| A. thaliana_AT5G48560.1#1 | 476 | 477 | B |
| Aquilegia_sp_TC24120#1 | 478 | 479 | B |
| Aquilegia_sp_TC26724#1 | 480 | 481 | B |
| C. annuum_TC15396#1 | 482 | 483 | B |
| G. hirsutum_TC144761#1 | 484 | 485 | B |
| G. max_Glyma01g09400.1#1 | 486 | 487 | B |
| G. max_Glyma02g13860.1#1 | 488 | 489 | B |
| G. max_Glyma03g21770.1#1 | 490 | 491 | B |
| G. max_Glyma08g46040.1#1 | 492 | 493 | B |
| G. max_Glyma18g32560.1#1 | 494 | 495 | B |
| G. max_GM06MC18997_59691073@18643#1 | 496 | 497 | B |
| G. raimondii_TC9358#1 | 498 | 499 | B |
| H. tuberosus_TA2737_4233#1 | 500 | 501 | B |
| M. truncatula_AC150842_12.5#1 | 502 | 503 | B |
| M. truncatula_AC171266_17.4#1 | 504 | 505 | B |
| O. sativa_LOC_Os04g28280.1#1 | 506 | 507 | B |
| O. sativa_LOC_Os06g16400.1#1 | 508 | 509 | B |
| O. sativa_LOC_Os08g41320.1#1 | 510 | 511 | B |
| O. sativa_LOC_Os09g32510.4#1 | 512 | 513 | B |
| P. persica_TC11169#1 | 514 | 515 | B |
| P. trichocarpa_553223#1 | 516 | 517 | B |
| P. trichocarpa_572918#1 | 518 | 519 | B |
| P. vulgaris_TC12782#1 | 520 | 521 | B |
| Poptr_TA1 | 522 | 523 | B |
| R. communis_TA2848_3988#1 | 524 | 525 | B |
| S. lycopersicum_TC196509#1 | 526 | 527 | B |
| S. lycopersicum_TC215759#1 | 528 | 529 | B |
| S. tuberosum_TC168229#1 | 530 | 531 | B |
| Triphysaria_sp_TC7138#1 | 532 | 533 | B |
| V. vinifera_GSVIVT00014998001#1 | 534 | 535 | B |
| Z. officinale_TA5989_94328#1 | 536 | 537 | B |

[0618] Sequences have been tentatively assembled and publicly disclosed by research institutions, such as The Institute for Genomic Research (TIGR; beginning with TA). For instance, the Eukaryotic Gene Orthologs (EGO) database may be used to identify such related sequences, either by keyword search or by using the BLAST algorithm with the nucleic acid sequence or polypeptide sequence of interest. Special nucleic acid sequence databases have been created for particular organisms, e.g. for certain prokaryotic organisms, such as by the Joint Genome Institute. Furthermore, access to proprietary databases, has allowed the identification of novel nucleic acid and polypeptide sequences.

### Example 2

### Alignment of Sequences to the Plypeptide Sequences Used in the Methods of the Invention

### 1. WAK-Like Polypeptides

[0619] Alignment of polypeptide sequences is performed using the ClustalW 2.0 algorithm of progressive alignment (Thompson et al. (1997) Nucleic Acids Res 25:4876-4882; Chema et al. (2003). Nucleic Acids Res 31:3497-3500) with standard setting (slow alignment, similarity matrix: Gonnet, gap opening penalty 10, gap extension penalty: 0.2). Minor manual editing is done to further optimise the alignment.

[0620] A phylogenetic tree of WAK-like polypeptides is constructed by aligning WAK-like sequences using MAFFT (Katoh and Toh (2008)—Briefings in Bioinformatics 9:286-298). A neighbour-joining tree is calculated using Quick-Tree (Howe et al. (2002), Bioinformatics 18(11): 1546-7), 100 bootstrap repetitions. The dendrogram is drawn using Dendroscope (Huson et al. (2007), BMC Bioinformatics 8(1):460). Confidence levels for 100 bootstrap repetitions are indicated for major branchings.

### 2. CDKB-RKA Polypeptides

[0621] Alignment of CDKB polypeptide sequences as represented in Table A2 was performed using the ClustalW 1.81 algorithm of progressive alignment (Thompson et al. (1997) Nucleic Acids Res 25:4876-4882; Chema et al. (2003). Nucleic Acids Res 31:3497-3500) with standard setting (slow alignment, similarity matrix: Gonnet, gap opening penalty 10, gap extension penalty: 0.2). Minor manual editing was done to further optimise the alignment. B-type CDK (CDKB) polypeptides are aligned in FIG. 3.

### 3. UPA20-Like Polypeptides

[0622] Alignment of polypeptide sequences was performed using the ClustalW 2.0 algorithm of progressive alignment (Thompson et al. (1997) Nucleic Acids Res 25:4876-4882; Chema et al. (2003). Nucleic Acids Res 31:3497-3500) with standard setting (slow alignment, similarity matrix: Gonnet, gap opening penalty 10, gap extension penalty: 0.2). Minor manual editing was done to further optimise the alignment. A representative number of UPA20-like polypeptides are aligned in FIG. 6.

[0623] A phylogenetic tree of a number of UP20 like polypeptides (FIG. 5) can be constructed by aligning UP20 like sequences using MAFFT (Katoh and Toh (2008)—Briefings in Bioinformatics 9:286-298). A neighbour-joining tree was calculated using Quick-Tree (Howe et al. (2002), Bioinformatics 18(11): 1546-7), 100 bootstrap repetitions. The dendrogram was drawn using Dendroscope (Huson et al. (2007), BMC Bioinformatics 8(1):460). Confidence levels for 100 bootstrap repetitions are indicated for major branchings.

[0624] It is further noted that according to the Arabidopsis bHLH tree given in Toledo-Ortiz et al. (2003) both the proteins from Clade A and from Clade B belong to the Subclade 18 shown in FIG. 2 of this paper.

### Example 3

### Calculation of Global Percentage Identity Between Polypeptide Sequences

[0625] Global percentages of similarity and identity between full length polypeptide sequences useful in performing the methods of the invention were determined using one of the methods available in the art, the MatGAT (Matrix Global Alignment Tool) software (BMC Bioinformatics. 2003 4:29. MatGAT: an application that generates similarity/identity matrices using protein or DNA sequences. Campanella J J, Bitincka L, Smalley J; software hosted by Ledion Bitincka). MatGAT software generates similarity/identity matrices for DNA or protein sequences without needing pre-alignment of the data. The program performs a series of pair-wise alignments using the Myers and Miller global alignment algorithm (with a gap opening penalty of 12, and a gap extension penalty of 2), calculates similarity and identity using for example Blosum 62 (for polypeptides), and then places the results in a distance matrix.

[0626] Results of the analysis show the global similarity and identity over the full length of the polypeptide sequences. Sequence similarity is shown in the bottom half of the dividing line and sequence identity is shown in the top half of the diagonal dividing line. Parameters used in the comparison are: Scoring matrix: Blosum62, First Gap: 12, Extending Gap: 2. A MATGAT table for local alignment of a specific domain, or data on % identity/similarity between specific domains can also be made.

### 1. UPA20-Like Polypeptides

[0627] Results of the analysis are shown in FIG. 7 for the global similarity and identity over the full length of a representative number of UP20 like polypeptide sequences. Sequence similarity is shown in the bottom half of the dividing line and sequence identity is shown in the top half of the diagonal dividing line. Parameters used in the comparison were: Scoring matrix: Blosum62, First Gap: 12, Extending Gap: 2. The sequence identity (in %) between the UPA20-like polypeptide sequences useful in performing the methods of the invention is generally higher than 25% compared to SEQ ID NO: 407.

[0628] Results of the analysis for the global similarity and identity over the full length of a number of polypeptide sequences, which, when used in the construction of a phylogenetic tree, such as the one depicted in FIG. 9, clusters with the group of polypeptides comprising the amino acid sequence represented by SEQ ID NO: 407 rather than with any other group, are shown in Table B1. In this table, the following legend is used: 1. P. trichocarpa 575437; 2. A. lyrata 495154; 3. A. thaliana AT5G50915.1; 4. Aquilegia sp TC24680; 5. B. napus TC73386; 6. C. annuum NP13055023; 7. C. sinensis TC686; 8. G. max Glyma04g37690.1; 9. G. max Glyma05g38450.1; 10. G. max Glyma06g17420.1; 11. G. raimondii TC6315; 12. M. domestica TC28668; 13. N. tabacum FG645212; 14. O. sativa LOC Os05g01256.1; 15. O. sativa LOC Os08g42470.1; 16. O. sativa LOC Os09g33580.1; 17. P. hybrida TC3261; 18. P. trichocarpa 773249; 19. P. virgatum TC28308; 20. S. bicolor Sb02g029530.1; 21. S. bicolor Sb07g025920.1; 22. S. officinarum TC78398; 23. T. aestivum TC301717; 24. Z. mays TC460846. 25. Z. mays TC476562; 26. Z. mays TC511518; 27 Z. mays ZM07MC24807 BFb0298G14@24734; 28. Z. mays ZM07MC32776 BFb0337M22@32678

TABLE B1

| | 1 | 2 | 3 | 4 | 5 | 6 | 7 | 8 | 9 | 10 | 11 | 12 | 13 | 14 | 15 | 16 | 17 |
|---|---|---|---|---|---|---|---|---|---|---|---|---|---|---|---|---|---|
| 1 | | 38 | 39 | 43 | 39 | 50 | 51 | 54 | 50 | 54 | 53 | 54 | 40 | 34 | 41 | 38 | 41 |
| 2 | 53 | | 87 | 38 | 60 | 43 | 38 | 42 | 40 | 41 | 41 | 38 | 37 | 36 | 43 | 39 | 39 |
| 3 | 53 | 90 | | 39 | 61 | 41 | 39 | 42 | 41 | 41 | 40 | 40 | 37 | 35 | 41 | 39 | 38 |
| 4 | 66 | 56 | 56 | | 39 | 45 | 45 | 47 | 42 | 46 | 45 | 45 | 35 | 36 | 40 | 39 | 38 |
| 5 | 55 | 70 | 72 | 60 | | 41 | 37 | 41 | 38 | 41 | 41 | 38 | 34 | 36 | 38 | 36 | 35 |
| 6 | 66 | 58 | 57 | 68 | 59 | | 46 | 47 | 46 | 50 | 51 | 48 | 56 | 36 | 42 | 39 | 55 |
| 7 | 67 | 52 | 51 | 62 | 52 | 62 | | 52 | 46 | 51 | 47 | 53 | 37 | 36 | 39 | 37 | 40 |
| 8 | 74 | 54 | 56 | 69 | 56 | 67 | 67 | | 63 | 94 | 54 | 56 | 42 | 35 | 39 | 38 | 41 |
| 9 | 67 | 54 | 54 | 64 | 55 | 64 | 61 | 78 | | 64 | 50 | 52 | 40 | 34 | 39 | 36 | 39 |
| 10 | 74 | 55 | 56 | 69 | 55 | 68 | 67 | 96 | 78 | | 55 | 57 | 42 | 36 | 38 | 38 | 42 |
| 11 | 71 | 57 | 57 | 66 | 58 | 70 | 64 | 73 | 66 | 73 | | 51 | 42 | 38 | 40 | 40 | 43 |
| 12 | 72 | 53 | 55 | 64 | 54 | 65 | 67 | 72 | 65 | 72 | 67 | | 38 | 36 | 38 | 35 | 40 |
| 13 | 49 | 55 | 53 | 50 | 48 | 61 | 47 | 52 | 50 | 52 | 53 | 50 | | 33 | 39 | 39 | 83 |
| 14 | 50 | 50 | 50 | 54 | 53 | 57 | 49 | 51 | 51 | 54 | 52 | 51 | 43 | | 39 | 35 | 32 |
| 15 | 56 | 60 | 60 | 57 | 53 | 57 | 53 | 56 | 55 | 56 | 57 | 50 | 53 | 55 | | 63 | 39 |
| 16 | 54 | 58 | 56 | 57 | 49 | 57 | 51 | 55 | 53 | 54 | 55 | 51 | 55 | 51 | 78 | | 41 |
| 17 | 50 | 55 | 53 | 51 | 47 | 59 | 50 | 51 | 48 | 50 | 54 | 50 | 91 | 44 | 53 | 56 | |
| 18 | 86 | 55 | 56 | 67 | 56 | 66 | 69 | 76 | 69 | 76 | 72 | 74 | 50 | 54 | 54 | 53 | 49 |
| 19 | 54 | 55 | 54 | 56 | 51 | 60 | 55 | 57 | 55 | 57 | 57 | 54 | 52 | 54 | 86 | 78 | 52 |
| 20 | 54 | 58 | 56 | 57 | 48 | 54 | 52 | 53 | 50 | 52 | 51 | 52 | 56 | 50 | 75 | 86 | 53 |
| 21 | 52 | 59 | 58 | 58 | 52 | 58 | 54 | 56 | 53 | 54 | 59 | 54 | 54 | 53 | 87 | 79 | 54 |
| 22 | 38 | 41 | 42 | 41 | 37 | 39 | 38 | 38 | 37 | 37 | 39 | 39 | 46 | 38 | 47 | 53 | 45 |
| 23 | 45 | 54 | 53 | 49 | 50 | 49 | 46 | 46 | 46 | 45 | 47 | 45 | 55 | 43 | 64 | 70 | 60 |
| 24 | 54 | 51 | 52 | 53 | 49 | 51 | 48 | 51 | 50 | 51 | 49 | 51 | 50 | 53 | 70 | 75 | 49 |
| 25 | 53 | 50 | 53 | 57 | 54 | 57 | 50 | 57 | 53 | 56 | 54 | 50 | 47 | 50 | 79 | 69 | 48 |
| 26 | 54 | 57 | 56 | 57 | 50 | 52 | 52 | 55 | 51 | 54 | 53 | 53 | 53 | 51 | 74 | 82 | 52 |
| 27 | 55 | 52 | 55 | 59 | 52 | 57 | 54 | 54 | 53 | 52 | 58 | 54 | 51 | 52 | 82 | 72 | 51 |
| 28 | 51 | 55 | 57 | 53 | 51 | 51 | 51 | 52 | 49 | 52 | 50 | 51 | 50 | 49 | 67 | 73 | 50 |

| | 18 | 19 | 20 | 21 | 22 | 23 | 24 | 25 | 26 | 27 | 28 |
|---|---|---|---|---|---|---|---|---|---|---|---|
| 1 | 77 | 39 | 38 | 38 | 31 | 35 | 38 | 35 | 37 | 38 | 37 |
| 2 | 39 | 41 | 40 | 41 | 32 | 39 | 36 | 36 | 39 | 37 | 37 |
| 3 | 42 | 41 | 39 | 41 | 33 | 39 | 36 | 36 | 37 | 40 | 37 |
| 4 | 46 | 39 | 38 | 41 | 30 | 35 | 37 | 36 | 37 | 38 | 35 |
| 5 | 39 | 36 | 37 | 40 | 30 | 36 | 35 | 35 | 37 | 36 | 38 |
| 6 | 47 | 42 | 39 | 43 | 31 | 38 | 36 | 36 | 37 | 40 | 35 |
| 7 | 53 | 41 | 37 | 39 | 30 | 33 | 36 | 34 | 34 | 37 | 34 |
| 8 | 59 | 40 | 38 | 41 | 31 | 34 | 37 | 39 | 37 | 38 | 36 |
| 9 | 53 | 38 | 36 | 38 | 30 | 33 | 36 | 35 | 35 | 38 | 33 |
| 10 | 59 | 39 | 38 | 39 | 30 | 32 | 36 | 36 | 37 | 37 | 36 |
| 11 | 53 | 39 | 37 | 40 | 31 | 34 | 38 | 36 | 35 | 37 | 34 |
| 12 | 57 | 38 | 34 | 37 | 29 | 34 | 34 | 36 | 35 | 35 | 34 |
| 13 | 38 | 39 | 39 | 39 | 29 | 36 | 37 | 36 | 37 | 35 | 36 |
| 14 | 34 | 39 | 36 | 37 | 30 | 34 | 37 | 36 | 37 | 38 | 35 |
| 15 | 39 | 76 | 60 | 75 | 41 | 51 | 55 | 65 | 57 | 69 | 50 |
| 16 | 37 | 61 | 67 | 62 | 44 | 58 | 59 | 52 | 62 | 56 | 54 |
| 17 | 41 | 38 | 39 | 39 | 31 | 39 | 38 | 36 | 38 | 34 | 38 |
| 18 | | 40 | 36 | 39 | 31 | 37 | 35 | 35 | 36 | 37 | 36 |
| 19 | 55 | | 59 | 87 | 43 | 48 | 53 | 72 | 56 | 79 | 50 |
| 20 | 54 | 74 | | 60 | 61 | 58 | 79 | 51 | 86 | 56 | 76 |
| 21 | 55 | 92 | 76 | | 40 | 51 | 54 | 75 | 55 | 82 | 50 |
| 22 | 40 | 49 | 64 | 48 | | 53 | 52 | 35 | 56 | 41 | 56 |
| 23 | 44 | 63 | 70 | 65 | 63 | | 52 | 43 | 55 | 48 | 54 |
| 24 | 51 | 72 | 84 | 70 | 55 | 63 | | 49 | 75 | 51 | 67 |
| 25 | 55 | 84 | 66 | 85 | 44 | 56 | 65 | | 48 | 70 | 43 |
| 26 | 54 | 71 | 92 | 75 | 60 | 67 | 83 | 65 | | 53 | 90 |
| 27 | 54 | 87 | 71 | 87 | 48 | 61 | 68 | 83 | 69 | | 48 |
| 28 | 51 | 65 | 84 | 69 | 61 | 65 | 77 | 59 | 93 | 64 | |

### Example 4

### Identification of Domains Comprised in Polypeptide Sequences Useful in Performing the Methods of the Invention

[0629] The Integrated Resource of Protein Families, Domains and Sites (InterPro) database is an integrated interface for the commonly used signature databases for text- and sequence-based searches. The InterPro database combines these databases, which use different methodologies and varying degrees of biological information about well-characterized proteins to derive protein signatures. Collaborating databases include SWISS-PROT, PROSITE, TrEMBL, PRINTS, Propom and Pfam, Smart and TIGRFAMs. Pfam is a large collection of multiple sequence alignments and hidden Markov models covering many common protein domains and families. Pfam is hosted at the Sanger Institute server in the United Kingdom. Interpro is hosted at the European Bioinformatics Institute in the United Kingdom.

### 1. CDKB-RKA Polypeptides

[0630] The results of the InterPro scan (InterPro database, release 31.0) of the polypeptide sequence as represented by SEQ ID NO: 320 are presented in Table C1.

TABLE C1
InterPro scan results (major accession numbers) of full length
polypeptide sequence as represented by SEQ ID NO: 320.

| | | | | Amino acid |
|---|---|---|---|---|
| Database/ | Accession | Accession | | coordinates |
| Method | number | name | Name | on SEQ ID NO 320 |
| PROFILE | PS50011 | IPR000719 | Protein | 4-303 |
| | | | kinase | |
| | | | catalytic | |
| | | | domain | |
| SMART | SM00220 | IPR002290 | Serine/ | 4-303 |
| | | | threonine- | |
| | | | protein | |
| | | | kinase | |
| | | | domain | |
| PROSITE | PS00108 | IPR008271 | Serine/ | 140-152 |
| | | | threonine- | |
| | | | protein | |
| | | | kinase | |
| | | | active site | |
| PROSITE | PS00107 | IPR017441 | Protein | 10-33 |
| | | | kinase, | |
| | | | ATP | |
| | | | binding | |
| | | | site | |
| PFAM | PF00069 | IPR017442 | Serine/ | 4-303 |
| | | | threonine- | |
| | | | protein | |
| | | | kinase | |
| | | | domain | |
| SMART | SM00219 | IPR020635 | Tyrosine- | 4-303 |
| | | | protein | |
| | | | kinase, | |
| | | | catalytic | |
| | | | domain | |

### 2. UPA20-Like Polypeptides

[0631] The results of the InterPro scan (InterPro database, release 30.0) of the polypeptide sequence as represented by SEQ ID NO: 407 are presented in Table C2.

TABLE C2
InterPro scan results (major accession numbers) of the polypeptide
sequence as represented by SEQ ID NO: 407.

| | | | Amino acid | | |
|---|---|---|---|---|---|
| | | | coordinates | | |
| | Accession | Accession | on SEQ ID | | |
| Database | Number | name | NO: 407 | E-value | accession |
| HMMSmart | SM00353 | HLH | [186-236] | 6.60E+05 | IPR001092 |
| HMMPanther | PTHR12565:SF7 | PTHR12565:SF7 | [183-230] | 1.10E+09 | NULL |
| ProfileScan | PS50888 | HLH | [174-231] | 0.00E+00 | IPR001092 |
| HMMPanther | PTHR12565 | PTHR12565 | [183-230] | 1.10E+09 | NULL |
| HMMPfam | PF00010 | HLH | [181-231] | 5.60E+07 | IPR001092 |
| superfamily | SSF47459 | HLH basic | [176-255] | 2.10E+00 | IPR011598 |
| Gene3D | G3DSA:4.10.280.10 | HLH_DNA_bd | [176-257] | 8.00E+07 | IPR011598 |

### Example 5

### Topology Prediction of the Polypeptide Sequences Useful in Performing the Methods of Invention

[0632] TargetP 1.1 predicts the subcellular location of eukaryotic proteins. The location assignment is based on the predicted presence of any of the N-terminal pre-sequences: chloroplast transit peptide (cTP), mitochondrial targeting peptide (mTP) or secretory pathway signal peptide (SP). Scores on which the final prediction is based are not really probabilities, and they do not necessarily add to one. However, the location with the highest score is the most likely according to TargetP, and the relationship between the scores (the reliability class) may be an indication of how certain the prediction is. The reliability class (RC) ranges from 1 to 5, where 1 indicates the strongest prediction. TargetP is maintained at the server of the Technical University of Denmark.

[0633] For the sequences predicted to contain an N-terminal presequence a potential cleavage site can also be predicted.

[0634] A number of parameters are selected, such as organism group (non-plant or plant), cutoff sets (none, predefined set of cutoffs, or user-specified set of cutoffs), and the calculation of prediction of cleavage sites (yes or no).

[0635] Many other algorithms can be used to perform such analyses, including:
[0636] ChloroP 1.1 hosted on the server of the Technical University of Denmark;
[0637] Protein Prowler Subcellular Localisation Predictor version 1.2 hosted on the server of the Institute for Molecular Bioscience, University of Queensland, Brisbane, Australia;
[0638] PENCE Proteome Analyst PA-GOSUB 2.5 hosted on the server of the University of Alberta, Edmonton, Alberta, Canada;
[0639] TMHMM, hosted on the server of the Technical University of Denmark
[0640] PSORT (URL: psort.org)
[0641] PLOC (Park and Kanehisa, Bioinformatics, 19, 1656-1663, 2003).

### Example 6

### Functional Assay Related to the Polypeptide Sequences Useful in Performing the Methods of the Invention

### 1. CDKB-RKA Polypeptides

[0642] In accordance with the present invention, a CDKB-RKA polypeptide is provided for use in methods according to the invention, wherein said polypeptide has reduced, or preferably lacks catalytic kinase activity as compared to a (unmodified or full length) CDKB polypeptide. There are many ways to measure kinase activity, well known to a person skilled in the art.

[0643] In one example, catalytic kinase activity of a mutated or truncated CDBK polypeptide as defined herein can be determined by means of a kinase assay and compared to the kinase activity of a corresponding unmodified CDKB polypeptide.

[0644] A kinase assay may, for example, be performed as described in Cockcroft et al., 2000 (Nature, 405 (6786), 575-579). The assay involves grinding plant material in liquid nitrogen and resuspending in an appropriate buffer (such as 1 ml of 50 mM Tris-HCl pH 7.5, 75 mM NaCl, 15 mM EGTA, 15 mMMgCl2, 1 mM dithiothreitol, 0.1% Tween 20, 1× complete Tm protease inhibitor, 1 mMNaF, 0.2 mM NaV, 2 mM Na-pyrophosphate, 60 mM beta-glycerophosphate). The suspension is then homogenized for 4×30 sec with 30 sec on ice between homogeneizations. The supernatant is then incubated with 20 microliters of protein A Sepharose (50% suspension) for 30 min at 4° C. The supernatant is incubated with 1 microliter of antiserum (directed against the carboxy terminal peptide of a CDC2b protein, as described in Setiady et al., 1996 (Plant Cell Physiology 37 (3), 369-376) for 2 h on ice, then 20 microliters protein A-Sepharose added and the sample rotated at 4° C. for an hour. Samples are washed 2 times with kinase buffer (50 mM Tris-HCl pH7.5, 100 mM NaCl, 5 mM EGTA, 1 mM DTT), resuspended in 15 microliters assay buffer (50 mM Tris-HCl pH7.5, 100 mM NaCl, 5 mM EGTA, 10 mM MgCl2, 1 mM DTT, 1 mM NaF, 0.2 mM Na-Vanadate, 2 mM Na pyrophosphate, 25 mM beta glycerophosphate, 0.5 mM histone H1 as a substrate, 0.5 mM PMSF, and 74 kBq [gamma ³²P ATP (>185 TBq mmol-1) per 15 microliters of reaction) and incubated at room temperature for 30 min. The reaction may be stopped by adding gel loading buffer and samples may be analysed using SDS-PAGE and quantified using a phosphoimager (Molecular Dynamics).

### Example 7

### Cloning of the Nucleic Acid Sequence Used in Methods of the Invention

### 1. WAK-Like Polypeptides

[0645] The nucleic acid sequence was amplified by PCR using as template a custom-made Oryza sativa seedlings cDNA library. PCR was performed using a commercially available proofreading Taq DNA polymerase in standard conditions, using 200 ng of template in a 50 μl PCR mix. The primers used were prm16798 (SEQ ID NO: 307; sense): 5′-ggggacaagttt gtacaaaaaagcaggcttaaacaatgaccaagcttctccac-3′ and prm16761 (SEQ ID NO: 308; reverse, complementary): 5′-ggggaccactttgtacaagaaagctgggttcattatttgatgagctgtagctttc-3′, which include the AttB sites for Gateway recombination. The amplified PCR fragment was purified also using standard methods. The first step of the Gateway procedure, the BP reaction, was then performed, during which the PCR fragment recombined in vivo with the pDONR201 plasmid to produce, according to the Gateway terminology, an “entry clone”, pWAK-like. Plasmid pDONR201 was purchased from Invitrogen, as part of the Gateway® technology.

[0646] The entry clone comprising SEQ ID NO: 1 was then used in an LR reaction with a destination vector used for Oryza sativa transformation. This vector contained as functional elements within the T-DNA borders: a plant selectable marker; a screenable marker expression cassette; and a Gateway cassette intended for LR in vivo recombination with the nucleic acid sequence of interest already cloned in the entry clone. A rice GOS2 promoter (SEQ ID NO: 306) for constitutive expression was located upstream of this Gateway cassette.

[0647] After the LR recombination step, the resulting expression vector pGOS2::WAK-like (FIG. 1) was transformed into Agrobacterium strain LBA4044 according to methods well known in the art.

[0648] In the same way an expression vector comprising SEQ ID NO: 3 was prepared using primers prm16656 (SEQ ID NO: 309, sense): 5′-atggcaaagatgatgcttta-3′ and prm16657 (SEQ ID NO: 310; reverse, complementary): 5′-ggggaccactttgtacaagaaagctgggttcattactg tcttatcttcg caagtttt-3′.

[0649] Furthermore, in the same way also an expression vector comprising SEQ ID NO: 5 was prepared using primers prm16710 (SEQ ID NO: 311, sense): 5′-ggggacaagtttgtacaaaaaa gcaggcttaaacaatgagcctcttcgatggattac-3′ and prm16711 (SEQ ID NO: 312; reverse, complementary): 5′-ggggaccactttgtacaagaaagctgggttcattattgcttttgtatgtcttttttcca-3′; an expression vector comprising SEQ ID NO: 7 was prepared using primers prm16603 (SEQ ID NO: 313, sense): 5′-ggggacaagtttgtacaaaaaagcaggcttaaacaatgggacctgtgctgctgt-3′ and prm16604 (SEQ ID NO: 314; reverse, complementary): 5′-ggggaccactttgtacaagaaagc tgggttcatta ttttctttgcatatgtctcctcc-3′; and an expression vector comprising SEQ ID NO: 9 was prepared using primers prm16118 (SEQ ID NO: 315, sense): 5′-ggggacaagtttgtacaaaaa agcaggcttaaacaatgtctccccaccgag-3′ and prm16119 (SEQ ID NO: 316; reverse, complementary): 5′-ggggaccactttgtacaagaaagctgggtcatcgatcatctcgcaa-3′.

### 2. CDKB-RKA Polypeptides

[0650] An entry clone comprising SEQ ID NO: 317 was used in an LR reaction with a destination vector used for Oryza sativa transformation. This vector contained as functional elements within the T-DNA borders: a plant selectable marker; a screenable marker expression cassette; and a Gateway cassette intended for LR in vivo recombination with the nucleic acid sequence of interest already cloned in the entry clone. A rice High Mobility Group Protein (HMGP) promoter (SEQ ID NO: 405) for constitutive expression was located upstream of this Gateway cassette. After the LR recombination step, the resulting expression vector promoter::CDKB-RKA (FIG. 4) was transformed into Agrobacterium strain LBA4044 according to methods well known in the art.

[0651] The nucleic acid sequence represented by SEQ ID NO: 317 can be readily obtained by applying common PCR technology, using as template a custom-made Arabidopsis thaliana seedlings cDNA library, e.g. Arabidopsis ecotype An-1. PCR can be performed using a commercially available proofreading Taq DNA polymerase in standard conditions, using 200 ng of template in a 50 μl PCR mix.

[0652] The CDKB-RKA polypeptide represented by SEQ ID NO: 318, and encoded by SEQ ID NO: 317, is obtained by a nucleotide substitution at position 388 of SEQ ID NO: 320, where an A was replaced by a T (and thus a Lys by a stop codon). Based on this information, a skilled person can design a forward and a reverse primer for use in the PCR mix. The above-indicated point mutation can be included anywhere in the reverse primer, which is designed to have a similar melting temperature as the forward primer. More than one substitution can be made, for example to create another stop codon than TAA (TAG,TGA). Both the forward and the reverse primer include the AttB sites for Gateway recombination. The amplified PCR fragment can be purified also using standard methods. The first step of the Gateway procedure, the BP reaction, is then performed, during which the PCR fragment recombined in vitro with the pDONR201 plasmid to produce, according to the Gateway terminology, an “entry clone”, pCDKB-RKA. Plasmid pDONR201 can be purchased from Invitrogen, as part of the Gateway® technology.

### 3. UPA20-Like Polypeptides

### 3.1. SEQ ID NO 406

[0653] The nucleic acid sequence was amplified by PCR using as template a custom-made Populus trichocarpa seedlings cDNA library. PCR was performed using a commercially available proofreading Taq DNA polymerase in standard conditions, using 200 ng of template in a 50 μl PCR mix. The primers used were prm15499 (SEQ ID NO: 548; sense, start codon in bold): 5′-ggggacaagtttgtacaaaaaagcaggcttaaacaatggcaggcttttcatatcaa-3′ and prm15500 (SEQ ID NO: 549; reverse, complementary): 5′-ggggaccactttgtacaagaaagc tgggtggcagcgcttggtatatttatt-3′, which include the AttB sites for Gateway recombination. The amplified PCR fragment was purified also using standard methods. The first step of the Gateway procedure, the BP reaction, was then performed, during which the PCR fragment recombined in vivo with the pDONR201 plasmid to produce, according to the Gateway terminology, an “entry clone”, pUP20A. Plasmid pDONR201 was purchased from Invitrogen, as part of the Gateway® technology.

[0654] The entry clone comprising SEQ ID NO: 406 was then used in an LR reaction with a destination vector used for Oryza sativa transformation. This vector contained as functional elements within the T-DNA borders: a plant selectable marker; a screenable marker expression cassette; and a Gateway cassette intended for LR in vivo recombination with the nucleic acid sequence of interest already cloned in the entry clone. A rice GOS2 promoter (SEQ ID NO: 545) for constitutive expression was located upstream of this Gateway cassette.

[0655] After the LR recombination step, the resulting expression vector pGOS2::UP20A like (FIG. 8) was transformed into Agrobacterium strain LBA4044 according to methods well known in the art.

### 3.2. SEQ ID NO 410

[0656] The nucleic acid sequence was amplified by PCR using as template a custom-made Arabidopsis thaliana seedlings cDNA library. PCR was performed using a commercially available proofreading Taq DNA polymerase in standard conditions, using 200 ng of template in a 50 μl PCR mix. The primers used were prm15497 (SEQ ID NO: 550; sense, start codon in bold): 5′-ggggacaagtttgtacaaaaaagcaggcttaaacaatggcaactttctcttatttc-3′ and prm15498 (SEQ ID NO: 551; reverse, complementary): 5′-ggggaccactttgtacaagaaagctgggt tttgtgtcgacatgtaatttt-3′, which include the AttB sites for Gateway recombination. The amplified PCR fragment was purified also using standard methods. The first step of the Gateway procedure, the BP reaction, was then performed, during which the PCR fragment recombined in vivo with the pDONR201 plasmid to produce, according to the Gateway terminology, an “entry clone”, pUP20A. Plasmid pDONR201 was purchased from Invitrogen, as part of the Gateway® technology.

[0657] The entry clone comprising SEQ ID NO: 410 was then used in an LR reaction with a destination vector used for Oryza sativa transformation. This vector contained as functional elements within the T-DNA borders: a plant selectable marker; a screenable marker expression cassette; and a Gateway cassette intended for LR in vivo recombination with the nucleic acid sequence of interest already cloned in the entry clone. A rice GOS2 promoter (SEQ ID NO: 545) for constitutive expression was located upstream of this Gateway cassette.

[0658] After the LR recombination step, the resulting expression vector pGOS2::UP20A like (similar as represented in FIG. 8) was transformed into Agrobacterium strain LBA4044 according to methods well known in the art.

### 3.3. SEQ ID NO 440

[0659] The nucleic acid sequence was amplified by PCR using as template a custom-made Populus trichocarpa seedlings cDNA library. PCR was performed using a commercially available proofreading Taq DNA polymerase in standard conditions, using 200 ng of template in a 50 μl PCR mix. The primers used were prm15501 (SEQ ID NO: 552; sense, start codon in bold): 5′-ggggacaagtttgtacaaaaaagcaggcttaaacaatggcagccttttcgtatc-3′ and prm15502 (SEQ ID NO: 553; reverse, complementary): 5′-ggggaccactttgtacaagaaagctgggta gggcagctcttggtatctat-3′, which include the AttB sites for Gateway recombination. The amplified PCR fragment was purified also using standard methods. The first step of the Gateway procedure, the BP reaction, was then performed, during which the PCR fragment recombined in vivo with the pDONR201 plasmid to produce, according to the Gateway terminology, an “entry clone”, pUP20A. Plasmid pDONR201 was purchased from Invitrogen, as part of the Gateway® technology.

[0660] The entry clone comprising SEQ ID NO: 440 was then used in an LR reaction with a destination vector used for Oryza sativa transformation. This vector contained as functional elements within the T-DNA borders: a plant selectable marker; a screenable marker expression cassette; and a Gateway cassette intended for LR in vivo recombination with the nucleic acid sequence of interest already cloned in the entry clone. A rice GOS2 promoter (SEQ ID NO: 545) for constitutive expression was located upstream of this Gateway cassette.

[0661] After the LR recombination step, the resulting expression vector pGOS2::UP20A like (similar as represented in FIG. 8) was transformed into Agrobacterium strain LBA4044 according to methods well known in the art.

### 3.4. SEQ ID NO 508

[0662] The nucleic acid sequence was amplified by PCR using as template a custom-made Oryza sativa seedlings cDNA library. PCR was performed using a commercially available proofreading Taq DNA polymerase in standard conditions, using 200 ng of template in a 50 μl PCR mix. The primers used were prm14919 (SEQ ID NO: 554; sense, start codon in bold): 5′-ggggacaagtttgtacaaaaaagcaggcttaaacaatgaatgagaaggacgcca-3′ and prm14920 (SEQ ID NO: 555; reverse, complementary): 5′-ggggaccactttgtacaagaaagctgggtcttgcttcagtt gtggaatca-3′, which include the AttB sites for Gateway recombination. The amplified PCR fragment was purified also using standard methods. The first step of the Gateway procedure, the BP reaction, was then performed, during which the PCR fragment recombined in vivo with the pDONR201 plasmid to produce, according to the Gateway terminology, an “entry clone”, pUP20A. Plasmid pDONR201 was purchased from Invitrogen, as part of the Gateway® technology.

[0663] The entry clone comprising SEQ ID NO: 508 was then used in an LR reaction with a destination vector used for Oryza sativa transformation. This vector contained as functional elements within the T-DNA borders: a plant selectable marker; a screenable marker expression cassette; and a Gateway cassette intended for LR in vivo recombination with the nucleic acid sequence of interest already cloned in the entry clone. A rice GOS2 promoter (SEQ ID NO: 545) for constitutive expression was located upstream of this Gateway cassette.

[0664] After the LR recombination step, the resulting expression vector pGOS2::UP20A like (similar as represented in FIG. 8) was transformed into Agrobacterium strain LBA4044 according to methods well known in the art.

### Example 8

### Plant Transformation

### Rice Transformation

[0665] The Agrobacterium containing the expression vector was used to transform Oryza sativa plants. Mature dry seeds of the rice japonica cultivar Nipponbare were dehusked.

[0666] Sterilization was carried out by incubating for one minute in 70% ethanol, followed by 30 to 60 minutes, preferably 30 minutes in sodium hypochlorite solution (depending on the grade of contamination), followed by a 3 to 6 times, preferably 4 time wash with sterile distilled water. The sterile seeds were then germinated on a medium containing 2,4-D (callus induction medium). After incubation in light for 6 days scutellum-derived calli is transformed with Agrobacterium as described herein below.

[0667] Agrobacterium strain LBA4404 containing the expression vector was used for co-cultivation. Agrobacterium was inoculated on AB medium with the appropriate antibiotics and cultured for 3 days at 28° C. The bacteria were then collected and suspended in liquid co-cultivation medium to a density (OD₆₀₀) of about 1. The calli were immersed in the suspension for 1 to 15 minutes. The callus tissues were then blotted dry on a filter paper and transferred to solidified, co-cultivation medium and incubated for 3 days in the dark at 25° C. After washing away the Agrobacterium, the calli were grown on 2,4-D-containing medium for 10 to 14 days (growth time for indica: 3 weeks) under light at 28° C.-32° C. in the presence of a selection agent. During this period, rapidly growing resistant callus developed. After transfer of this material to regeneration media, the embryogenic potential was released and shoots developed in the next four to six weeks. Shoots were excised from the calli and incubated for 2 to 3 weeks on an auxin-containing medium from which they were transferred to soil. Hardened shoots were grown under high humidity and short days in a greenhouse.

[0668] Transformation of rice cultivar indica can also be done in a similar way as give above according to techniques well known to a skilled person.

[0669] 35 to 90 independent TO rice transformants were generated for one construct. The primary transformants were transferred from a tissue culture chamber to a greenhouse. After a quantitative PCR analysis to verify copy number of the T-DNA insert, only single copy transgenic plants that exhibit tolerance to the selection agent were kept for harvest of T1 seed. Seeds were then harvested three to five months after transplanting. The method yielded single locus transformants at a rate of over 50% (Aldemita and Hodges1996, Chan et al. 1993, Hiei et al. 1994).

### Example 9

### Transformation of Other Crops

### Corn Transformation

[0670] Transformation of maize (Zea mays) is performed with a modification of the method described by Ishida et al. (1996) Nature Biotech 14(6): 745-50. Transformation is genotype-dependent in corn and only specific genotypes are amenable to transformation and regeneration. The inbred line A188 (University of Minnesota) or hybrids with A188 as a parent are good sources of donor material for transformation, but other genotypes can be used successfully as well. Ears are harvested from corn plant approximately 11 days after pollination (DAP) when the length of the immature embryo is about 1 to 1.2 mm. Immature embryos are cocultivated with Agrobacterium tumefaciens containing the expression vector, and transgenic plants are recovered through organogenesis. Excised embryos are grown on callus induction medium, then maize regeneration medium, containing the selection agent (for example imidazolinone but various selection markers can be used). The Petri plates are incubated in the light at 25° C. for 2-3 weeks, or until shoots develop. The green shoots are transferred from each embryo to maize rooting medium and incubated at 25° C. for 2-3 weeks, until roots develop. The rooted shoots are transplanted to soil in the greenhouse. T1 seeds are produced from plants that exhibit tolerance to the selection agent and that contain a single copy of the T-DNA insert.

### Wheat Transformation

[0671] Transformation of wheat is performed with the method described by Ishida et al. (1996) Nature Biotech 14(6): 745-50. The cultivar Bobwhite (available from CIMMYT, Mexico) is commonly used in transformation. Immature embryos are co-cultivated with Agrobacterium tumefaciens containing the expression vector, and transgenic plants are recovered through organogenesis. After incubation with Agrobacterium, the embryos are grown in vitro on callus induction medium, then regeneration medium, containing the selection agent (for example imidazolinone but various selection markers can be used). The Petri plates are incubated in the light at 25° C. for 2-3 weeks, or until shoots develop. The green shoots are transferred from each embryo to rooting medium and incubated at 25° C. for 2-3 weeks, until roots develop. The rooted shoots are transplanted to soil in the greenhouse. T1 seeds are produced from plants that exhibit tolerance to the selection agent and that contain a single copy of the T-DNA insert.

### Soybean Transformation

[0672] Soybean is transformed according to a modification of the method described in the Texas A&M U.S. Pat. No. 5,164,310. Several commercial soybean varieties are amenable to transformation by this method. The cultivar Jack (available from the Illinois Seed foundation) is commonly used for transformation. Soybean seeds are sterilised for in vitro sowing. The hypocotyl, the radicle and one cotyledon are excised from seven-day old young seedlings. The epicotyl and the remaining cotyledon are further grown to develop axillary nodes. These axillary nodes are excised and incubated with Agrobacterium tumefaciens containing the expression vector. After the cocultivation treatment, the explants are washed and transferred to selection media. Regenerated shoots are excised and placed on a shoot elongation medium. Shoots no longer than 1 cm are placed on rooting medium until roots develop. The rooted shoots are transplanted to soil in the greenhouse. T1 seeds are produced from plants that exhibit tolerance to the selection agent and that contain a single copy of the T-DNA insert.

### Rapeseed/Canola Transformation

[0673] Cotyledonary petioles and hypocotyls of 5-6 day old young seedling are used as explants for tissue culture and transformed according to Babic et al. (1998, Plant Cell Rep 17: 183-188). The commercial cultivar Westar (Agriculture Canada) is the standard variety used for transformation, but other varieties can also be used. Canola seeds are surface-sterilized for in vitro sowing. The cotyledon petiole explants with the cotyledon attached are excised from the in vitro seedlings, and inoculated with Agrobacterium (containing the expression vector) by dipping the cut end of the petiole explant into the bacterial suspension. The explants are then cultured for 2 days on MSBAP-3 medium containing 3 mg/l BAP, 3% sucrose, 0.7% Phytagar at 23° C., 16 hr light. After two days of co-cultivation with Agrobacterium, the petiole explants are transferred to MSBAP-3 medium containing 3 mg/l BAP, cefotaxime, carbenicillin, or timentin (300 mg/l) for 7 days, and then cultured on MSBAP-3 medium with cefotaxime, carbenicillin, or timentin and selection agent until shoot regeneration. When the shoots are 5-10 mm in length, they are cut and transferred to shoot elongation medium (MSBAP-0.5, containing 0.5 mg/l BAP). Shoots of about 2 cm in length are transferred to the rooting medium (MS0) for root induction. The rooted shoots are transplanted to soil in the greenhouse. T1 seeds are produced from plants that exhibit tolerance to the selection agent and that contain a single copy of the T-DNA insert.

### Alfalfa Transformation

[0674] A regenerating clone of alfalfa (Medicago sativa) is transformed using the method of (McKersie et al., 1999 Plant Physiol 119: 839-847). Regeneration and transformation of alfalfa is genotype dependent and therefore a regenerating plant is required. Methods to obtain regenerating plants have been described. For example, these can be selected from the cultivar Rangelander (Agriculture Canada) or any other commercial alfalfa variety as described by Brown D C W and A Atanassov (1985. Plant Cell Tissue Organ Culture 4: 111-112). Alternatively, the RA3 variety (University of Wisconsin) has been selected for use in tissue culture (Walker et al., 1978 Am J Bot 65:654-659). Petiole explants are cocultivated with an overnight culture of Agrobacterium tumefaciens C58C1 pMP90 (McKersie et al., 1999 Plant Physiol 119: 839-847) or LBA4404 containing the expression vector. The explants are cocultivated for 3 d in the dark on SH induction medium containing 288 mg/L Pro, 53 mg/L thioproline, 4.35 g/L K2SO4, and 100 μm acetosyringinone. The explants are washed in half-strength Murashige-Skoog medium (Murashige and Skoog, 1962) and plated on the same SH induction medium without acetosyringinone but with a suitable selection agent and suitable antibiotic to inhibit Agrobacterium growth. After several weeks, somatic embryos are transferred to BOi2Y development medium containing no growth regulators, no antibiotics, and 50 g/L sucrose. Somatic embryos are subsequently germinated on half-strength Murashige-Skoog medium. Rooted seedlings were transplanted into pots and grown in a greenhouse. T1 seeds are produced from plants that exhibit tolerance to the selection agent and that contain a single copy of the T-DNA insert.

### Cotton Transformation

[0675] Cotton is transformed using Agrobacterium tumefaciens according to the method described in U.S. Pat. No. 5,159,135. Cotton seeds are surface sterilised in 3% sodium hypochlorite solution during 20 minutes and washed in distilled water with 500 μg/ml cefotaxime. The seeds are then transferred to SH-medium with 50 μg/ml benomyl for germination. Hypocotyls of 4 to 6 days old seedlings are removed, cut into 0.5 cm pieces and are placed on 0.8% agar. An Agrobacterium suspension (approx. 108 cells per ml, diluted from an overnight culture transformed with the gene of interest and suitable selection markers) is used for inoculation of the hypocotyl explants. After 3 days at room temperature and lighting, the tissues are transferred to a solid medium (1.6 g/l Gelrite) with Murashige and Skoog salts with B5 vitamins (Gamborg et al., Exp. Cell Res. 50:151-158 (1968)), 0.1 mg/l 2,4-D, 0.1 mg/l 6-furfurylaminopurine and 750 μg/ml MgCL2, and with 50 to 100 μg/ml cefotaxime and 400-500 μg/ml carbenicillin to kill residual bacteria. Individual cell lines are isolated after two to three months (with subcultures every four to six weeks) and are further cultivated on selective medium for tissue amplification (30° C., 16 hr photoperiod). Transformed tissues are subsequently further cultivated on non-selective medium during 2 to 3 months to give rise to somatic embryos. Healthy looking embryos of at least 4 mm length are transferred to tubes with SH medium in fine vermiculite, supplemented with 0.1 mg/l indole acetic acid, 6 furfurylaminopurine and gibberellic acid. The embryos are cultivated at 30° C. with a photoperiod of 16 hrs, and plantlets at the 2 to 3 leaf stage are transferred to pots with vermiculite and nutrients. The plants are hardened and subsequently moved to the greenhouse for further cultivation.

### Sugarbeet Transformation

[0676] Seeds of sugarbeet (Beta vulgaris L.) are sterilized in 70% ethanol for one minute followed by 20 min. shaking in 20% Hypochlorite bleach e.g. Clorox® regular bleach (commercially available from Clorox, 1221 Broadway, Oakland, Calif. 94612, USA). Seeds are rinsed with sterile water and air dried followed by plating onto germinating medium (Murashige and Skoog (MS) based medium (Murashige, T., and Skoog, . . . , 1962. Physiol. Plant, vol. 15, 473-497) including B5 vitamins (Gamborg et al.; Exp. Cell Res., vol. 50, 151-8.) supplemented with 10 g/l sucrose and 0.8% agar). Hypocotyl tissue is used essentially for the initiation of shoot cultures according to Hussey and Hepher (Hussey, G., and Hepher, A., 1978. Annals of Botany, 42, 477-9) and are maintained on MS based medium supplemented with 30 g/l sucrose plus 0.25 mg/l benzylamino purine and 0.75% agar, pH 5.8 at 23-25° C. with a 16-hour photoperiod. Agrobacterium tumefaciens strain carrying a binary plasmid harbouring a selectable marker gene, for example nptII, is used in transformation experiments. One day before transformation, a liquid LB culture including antibiotics is grown on a shaker (28° C., 150 rpm) until an optical density (O.D.) at 600 nm of ˜1 is reached. Overnight-grown bacterial cultures are centrifuged and resuspended in inoculation medium (O.D.˜1) including Acetosyringone, pH 5.5. Shoot base tissue is cut into slices (1.0 cm×1.0 cm×2.0 mm approximately). Tissue is immersed for 30 s in liquid bacterial inoculation medium. Excess liquid is removed by filter paper blotting. Co-cultivation occurred for 24-72 hours on MS based medium incl. 30 g/l sucrose followed by a non-selective period including MS based medium, 30 g/l sucrose with 1 mg/l BAP to induce shoot development and cefotaxim for eliminating the Agrobacterium. After 3-10 days explants are transferred to similar selective medium harbouring for example kanamycin or G418 (50-100 mg/l genotype dependent). Tissues are transferred to fresh medium every 2-3 weeks to maintain selection pressure. The very rapid initiation of shoots (after 3-4 days) indicates regeneration of existing meristems rather than organogenesis of newly developed transgenic meristems. Small shoots are transferred after several rounds of subculture to root induction medium containing 5 mg/l NAA and kanamycin or G418. Additional steps are taken to reduce the potential of generating transformed plants that are chimeric (partially transgenic). Tissue samples from regenerated shoots are used for DNA analysis. Other transformation methods for sugarbeet are known in the art, for example those by Linsey & Gallois (Linsey, K., and Gallois, P., 1990. Journal of Experimental Botany; vol. 41, No. 226; 529-36) or the methods published in the international application published as WO9623891A.

### Sugarcane Transformation

[0677] Spindles are isolated from 6-month-old field grown sugarcane plants (Arencibia et al., 1998. Transgenic Research, vol. 7, 213-22; Enriquez-Obregon et al., 1998. Planta, vol. 206, 20-27). Material is sterilized by immersion in a 20% Hypochlorite bleach e.g. Clorox® regular bleach (commercially available from Clorox, 1221 Broadway, Oakland, Calif. 94612, USA) for 20 minutes. Transverse sections around 0.5 cm are placed on the medium in the top-up direction. Plant material is cultivated for 4 weeks on MS (Murashige, T., and Skoog, . . . , 1962. Physiol. Plant, vol. 15, 473-497) based medium incl. B5 vitamins (Gamborg, O., et al., 1968. Exp. Cell Res., vol. 50, 151-8) supplemented with 20 g/l sucrose, 500 mg/l casein hydrolysate, 0.8% agar and 5 mg/l 2,4-D at 23° C. in the dark. Cultures are transferred after 4 weeks onto identical fresh medium. Agrobacterium tumefaciens strain carrying a binary plasmid harbouring a selectable marker gene, for example hpt, is used in transformation experiments. One day before transformation, a liquid LB culture including antibiotics is grown on a shaker (28° C., 150 rpm) until an optical density (O.D.) at 600 nm of ˜0.6 is reached. Overnight-grown bacterial cultures are centrifuged and resuspended in MS based inoculation medium (O.D.˜0.4) including acetosyringone, pH 5.5. Sugarcane embryogenic callus pieces (2-4 mm) are isolated based on morphological characteristics as compact structure and yellow colour and dried for 20 min. in the flow hood followed by immersion in a liquid bacterial inoculation medium for 10-20 minutes. Excess liquid is removed by filter paper blotting. Co-cultivation occurred for 3-5 days in the dark on filter paper which is placed on top of MS based medium incl. B5 vitamins containing 1 mg/l 2,4-D. After co-cultivation calli are washed with sterile water followed by a non-selective cultivation period on similar medium containing 500 mg/l cefotaxime for eliminating remaining Agrobacterium cells. After 3-10 days explants are transferred to MS based selective medium incl. B5 vitamins containing 1 mg/l 2,4-D for another 3 weeks harbouring 25 mg/l of hygromycin (genotype dependent). All treatments are made at 23° C. under dark conditions. Resistant calli are further cultivated on medium lacking 2,4-D including 1 mg/l BA and 25 mg/l hygromycin under 16 h light photoperiod resulting in the development of shoot structures. Shoots are isolated and cultivated on selective rooting medium (MS based including, 20 g/l sucrose, 20 mg/l hygromycin and 500 mg/l cefotaxime). Tissue samples from regenerated shoots are used for DNA analysis. Other transformation methods for sugarcane are known in the art, for example from the in-ternational application published as WO2010/151634A and the granted European patent EP1831378.

### Example 10

### Phenotypic Evaluation Procedure

### 10.1 Evaluation Setup

[0678] 35 to 90 independent TO rice transformants were generated. The primary transformants were transferred from a tissue culture chamber to a greenhouse for growing and harvest of T1 seed. Six events, of which the T1 progeny segregated 3:1 for presence/absence of the transgene, were retained. For each of these events, approximately 10 T1 seedlings containing the transgene (hetero- and homo-zygotes) and approximately 10 T1 seedlings lacking the transgene (nullizygotes) were selected by monitoring visual marker expression. The transgenic plants and the corresponding nullizygotes were grown side-by-side at random positions. Greenhouse conditions were of shorts days (12 hours light), 28° C. in the light and 22° C. in the dark, and a relative humidity of 70%. Plants grown under non-stress conditions were watered at regular intervals to ensure that water and nutrients were not limiting and to satisfy plant needs to complete growth and development, unless they were used in a stress screen.

[0679] From the stage of sowing until the stage of maturity the plants were passed several times through a digital imaging cabinet. At each time point digital images (2048×1536 pixels, 16 million colours) were taken of each plant from at least 6 different angles.

[0680] T1 events can be further evaluated in the T2 generation following the same evaluation procedure as for the T1 generation, e.g. with less events and/or with more individuals per event.

### Drought Screen

[0681] T1 or T2 plants were grown in potting soil under normal conditions until they approached the heading stage. They were then transferred to a “dry” section where irrigation was withheld. Soil moisture probes were inserted in randomly chosen pots to monitor the soil water content (SWC). When SWC went below certain thresholds, the plants were automatically re-watered continuously until a normal level was reached again. The plants were then re-transferred again to normal conditions. The rest of the cultivation (plant maturation, seed harvest) was the same as for plants not grown under abiotic stress conditions. Growth and yield parameters were recorded as detailed for growth under normal conditions.

### Nitrogen Use Efficiency Screen

[0682] T1 or T2 plants were grown in potting soil under normal conditions except for the nutrient solution. The pots were watered from transplantation to maturation with a specific nutrient solution containing reduced N nitrogen (N) content, usually between 7 to 8 times less. The rest of the cultivation (plant maturation, seed harvest) was the same as for plants not grown under abiotic stress. Growth and yield parameters were recorded as detailed for growth under normal conditions.

### Salt Stress Screen

[0683] T1 or T2 plants are grown on a substrate made of coco fibers and particles of baked clay (Argex) (3 to 1 ratio). A normal nutrient solution is used during the first two weeks after transplanting the plantlets in the greenhouse. After the first two weeks, 25 mM of salt (NaCl) is added to the nutrient solution, until the plants are harvested. Growth and yield parameters are recorded as detailed for growth under normal conditions.

### 10.2 Statistical Analysis: F Test

[0684] A two factor ANOVA (analysis of variants) was used as a statistical model for the overall evaluation of plant phenotypic characteristics. An F test was carried out on all the parameters measured of all the plants of all the events transformed with the gene of the present invention. The F test was carried out to check for an effect of the gene over all the transformation events and to verify for an overall effect of the gene, also known as a global gene effect. The threshold for significance for a true global gene effect was set at a 5% probability level for the F test. A significant F test value points to a gene effect, meaning that it is not only the mere presence or position of the gene that is causing the differences in phenotype.

### 10.3 Parameters Measured

[0685] From the stage of sowing until the stage of maturity the plants were passed several times through a digital imaging cabinet. At each time point digital images (2048×1536 pixels, 16 million colours) were taken of each plant from at least 6 different angles as described in WO 2010/031780. These measurements were used to determine different parameters.

### Biomass-Related Parameter Measurement

[0686] The plant aboveground area (or leafy biomass) was determined by counting the total number of pixels on the digital images from aboveground plant parts discriminated from the background. This value was averaged for the pictures taken on the same time point from the different angles and was converted to a physical surface value expressed in square mm by calibration. Experiments show that the aboveground plant area measured this way correlates with the biomass of plant parts above ground. The above ground area is the area measured at the time point at which the plant had reached its maximal leafy biomass.

[0687] Increase in root biomass is expressed as an increase in total root biomass (measured as maximum biomass of roots observed during the lifespan of a plant); or as an increase in the root/shoot index, measured as the ratio between root mass and shoot mass in the period of active growth of root and shoot. In other words, the root/shoot index is defined as the ratio of the rapidity of root growth to the rapidity of shoot growth in the period of active growth of root and shoot. Root biomass can be determined using a method as described in WO 2006/029987.

### Parameters Related to Development Time

[0688] The early vigour is the plant aboveground area three weeks post-germination. Early vigour was determined by counting the total number of pixels from aboveground plant parts discriminated from the background. This value was averaged for the pictures taken on the same time point from different angles and was converted to a physical surface value expressed in square mm by calibration.

[0689] AreaEmer is an indication of quick early development when this value is decreased compared to control plants. It is the ratio (expressed in %) between the time a plant needs to make 30% of the final biomass and the time needs to make 90% of its final biomass.

[0690] The “time to flower” or “flowering time” of the plant can be determined using the method as described in WO 2007/093444.

### Seed-Related Parameter Measurements

[0691] The mature primary panicles were harvested, counted, bagged, barcode-labelled and then dried for three days in an oven at 37° C. The panicles were then threshed and all the seeds were collected and counted. The seeds are usually covered by a dry outer covering, the husk. The filled husks (herein also named filled florets) were separated from the empty ones using an air-blowing device. The empty husks were discarded and the remaining fraction was counted again. The filled husks were weighed on an analytical balance.

[0692] The total number of seeds was determined by counting the number of filled husks that remained after the separation step. The total seed weight was measured by weighing all filled husks harvested from a plant.

[0693] The total number of seeds (or florets) per plant was determined by counting the number of husks (whether filled or not) harvested from a plant.

[0694] Thousand Kernel Weight (TKW) is extrapolated from the number of seeds counted and their total weight.

[0695] The Harvest Index (HI) in the present invention is defined as the ratio between the total seed weight and the above ground area (mm²), multiplied by a factor 10⁶.

[0696] The number of flowers per panicle as defined in the present invention is the ratio between the total number of seeds over the number of mature primary panicles.

[0697] The “seed fill rate” or “seed filling rate” as defined in the present invention is the proportion (expressed as a %) of the number of filled seeds (i.e. florets containing seeds) over the total number of seeds (i.e. total number of florets). In other words, the seed filling rate is the percentage of florets that are filled with seed.

### Example 10

### Results of the Phenotypic Evaluation of the Transgenic Plants

### 1. WAK-Like Polypeptides

[0698] The results of the evaluation of transgenic rice plants expressing a WAK-like polypeptide under non-stress conditions are presented below. See previous Examples for details on the generations of the transgenic plants.

[0699] The results of the evaluation of transgenic rice plants in the T1 generation and expressing a nucleic acid comprising SEQ ID NO: 1 under non-stress conditions are presented below.

[0700] An increase of at least 5% was observed for seed fill rate, and positive effects on thousand kernel weight (TKW).

TABLE D1
Data summary for transgenic rice plants expressing a nucleic acid
comprising SEQ ID NO: 1 under non-stress conditions; for each
parameter, the overall percent increase is shown, for each
parameter the p-value is <0.05.

| Parameter | Overall increase |
|---|---|
| fillrate | 5.6 |

[0701] The results of the evaluation of transgenic rice plants in the T1 generation and expressing a nucleic acid comprising SEQ ID NO: 3 in the nitrogen use efficiency screen as described above, are presented below.

[0702] An increase in root biomass was observed; as well as positive effects on seed fill rate, the amount of flowers per panicle and the greenness.

[0703] The results of the evaluation of transgenic rice plants in the T1 generation and expressing a nucleic acid comprising SEQ ID NO: 5 under non-stress conditions are presented below.

[0704] An increase of at least 5% was observed for seed fill rate, and positive effects on seed yield by positive effects on total weight of seeds and number of filled seeds, as well as positive effect on harvest index.

TABLE D2
Data summary for transgenic rice plants expressing a nucleic acid
comprising SEQ ID NO: 5 under non-stress conditions; for each
parameter, the overall percent increase is shown, for each
parameter the p-value is <0.05.

| Parameter | Overall increase |
|---|---|
| fillrate | 6.6 |

[0705] Evaluation of transgenic rice plants in the T1 generation and expressing a nucleic acid comprising SEQ ID NO: 7 under the drought screen as described above, showed an improved seed yield because of better fill rate.

[0706] Evaluation of transgenic rice plants in the T1 generation and expressing a nucleic acid comprising SEQ ID NO: 9 under non stress conditions, showed an improved seed yield because of better fill rate and larger amount of flowers per panicle.

### 2. CDKB-RKA Polypeptides

[0707] The results of the evaluation of transgenic rice plants in the T1 generation and expressing a nucleic acid encoding the CDKB-RKA polypeptide of SEQ ID NO: 318 under non-stress conditions are presented below in Table D3.

[0708] When grown under non-stress conditions, an increase of at least 5% was observed for aboveground biomass (AreaMax), root biomass (RootMax and RootThinMax), and for seed yield including total seed weight (totalwgseeds), number of seeds (nrfilledseed). In addition, plants expressing a nucleic acid encoding a CDK polypeptide of SEQ ID NO: 318 showed early vigor (EmerVigor).

TABLE D3
Data summary for transgenic rice plants; for each parameter, the
overall percent increase is shown for the confirmation
(T2 generation), for each parameter the p-value is <0.05.

| Parameter | Overall increase |
|---|---|
| AreaMax | 10.5 |
| EmerVigor | 24.8 |
| RootMax | 7.2 |
| totalwgseeds | 14.1 |
| nrfilledseed | 13.2 |
| RootThinMax | 5.0 |

### 3. UPA20-Like Polypeptides

### 3.1. SEQ ID NO: 406 Under Non-Stress Conditions

[0709] The results of the evaluation of transgenic rice plants of the T1 generation expressing the nucleic acid encoding of the UPA20 like polypeptide of SEQ ID NO: 407 under non-stress conditions are presented below in Table D4.

[0710] When grown under non-stress conditions, an increase of at least 3% was observed for the parameter thousand kernel weight (TKW) and of at least 5% was observed for parameters such as: biomass, including above ground biomass (area max) and root biomass (root max and root thick max); and seed yield, including total weight of seeds, harvest index, number of filled seeds, and number of flowers per panicle. In addition, it was noted that plants of at least one event also showed an increase of at least 5% in fill rate as compared to control plants.

TABLE D4
Data summary for transgenic rice plants; for each parameter,
the overall percent increase is shown for the plants of the T1
generation as compared to control plants, for each parameter
the p-value is <0.05.

| Parameter | Overall increase |
|---|---|
| AreaMax | 9.1 |
| RootMax | 7.9 |
| totalwgseeds | 19.2 |
| harvestindex | 8.8 |
| Nrfilledseed | 13.7 |
| RootThickMax | 8.8 |

### 3.2. SEQ ID NO: 410 Under Non Stress-Conditions

[0711] The results of the evaluation of transgenic rice plants of the T1 generation expressing the nucleic acid encoding of the UPA20 like polypeptide of SEQ ID NO: 411 under non-stress conditions indicated that when grown under non-stress conditions, transgenic plants showed an increase of at least 5%, and in particular of 9.4% in number of flowers per panicle as compared to control plants.

### 3.3. SEQ ID NO: 440 Under Non-Stress Conditions

[0712] The results of the evaluation of transgenic rice plants of the T1 generation expressing the nucleic acid encoding of the UPA20 like polypeptide of SEQ ID NO: 441 under non-stress conditions are presented below in Table D5.

[0713] When grown under non-stress conditions, an increase of at least 5% was observed for parameters such as: time to flower, and seed yield, including TKW and fill rate. In addition, it was noted that plants of at least two event also showed a significant increase of at least 5% in parameters such as harvest index and number of filled seeds as compared to control plants.

TABLE D5
Data summary for transgenic rice plants; for each parameter,
the overall percent increase is shown for the plants of the T1
generation as compared to control plants, for each parameter
the p-value is <0.05.

| Parameter | Overall increase |
|---|---|
| TimetoFlower | 5.6 |
| fillrate | 17.7 |
| TKW | 5.8 |

### 3.3. SEQ ID NO: 508 Under-Stress Conditions

[0714] Transgenic rice plants of the T1 generation expressing the nucleic acid encoding of the UPA20 like polypeptide of SEQ ID NO: 509 under stress conditions, more particularly under conditions of nitrogen deficiency, showed the following results as compared to control plants:
[0715] 1. plants of at least two events showed an increase of at least 5% in biomass, more particular above ground biomass;
[0716] 2. plants of at least one event showed an increase of at least 5% in parameters such as above ground biomass, total seed weight, fill rate, harvest index and number of filled seeds as compared to control plants, and an increase of at least 3% in TKW as compared to control plants;
[0717] 3. plants of at least two events showed an increase of at least 5% in TKW as compared to control plants.

The application's sequence listing, which the Patent Office published only in electronic form, follows.

SEQUENCE LISTING (563 sequences)

SEQ ID NO: 1 - DNA, 1137 bp, Oryza sativa
atgaccaagcttctccactccgcctgccttctcatctgcatttcaggcgccatcgggttggccgcggctgctgccggacacccaggctgccagacgaggtgcggggacgtcgacatcccgttccccttcggcatcggcgatcactgcgcgattcacgagggttttcggctcgagtgcggcaacgccacgaaaggcaccagcaatcagaagcctttctggggggacttcgaggtgatcaagatctccatggaagacggcaaggtctgggtgaaggcgtacatgtccaggcagtgctacgaccaatccacgggcggtatgtcatacagcgacgcatcggcgaatttgagtggttcatctttctggttatcggacacggataacaaaattaccgtgatcggatgcaagactctcgcctacatgacgaccgattcttatgtaatcgggtgttcgtcagcatgcgacaacaaagtgaacaaactaactcccaagaatggttcatgctctggcgctggctgctgccaggcaaatgttcctaagagcatacagtactaccagggttatttcaacgaaggctacaacaccactaaaatatggatgagcagcccttgcagctacatggcagtgatggaaaccgcagcattcaactttagcacaagttacctcacatccagcgtattttatgacacgtacaaggggggagttccggttgtctacgactgggccataacatcaaaaacatgtacagaatctagaagaaacaagacttcctacgcatgtattagtaacaacagtcagtgcattgacaacctgacgaatgcacaaggttaccgctgcaagtgctccaatggatatgaaggcaacccgtacataaaggatggttgcaaagatattgatgagtgcctcaacaatgctacttacccttgcaaggggatatgcaccaacacgttggggaatttcacctgctcatgctccccaggaagttatatgatgaatggagattgtatgccaaagaagaaactacgttttgactcagtgcctgtggtagtaggcgcaagtatcatatctgttgtcctggtgattaccataatgtgtgcttacttgatcaaagagagaagaaagctacagctcatcaaataa

SEQ ID NO: 2 - protein, 378 aa, Oryza sativa
MTKLLHSACLLICISGAIGLAAAAAGHPGCQTRCGDVDIPFPFGIGDHCAIHEGFRLECGNATKGTSNQKPFWGDFEVIKISMEDGKVWVKAYMSRQCYDQSTGGMSYSDASANLSGSSFWLSDTDNKITVIGCKTLAYMTTDSYVIGCSSACDNKVNKLTPKNGSCSGAGCCQANVPKSIQYYQGYFNEGYNTTKIWMSSPCSYMAVMETAAFNFSTSYLTSSVFYDTYKGGVPVVYDWAITSKTCTESRRNKTSYACISNNSQCIDNLTNAQGYRCKCSNGYEGNPYIKDGCKDIDECLNNATYPCKGICTNTLGNFTCSCSPGSYMMNGDCMPKKKLRFDSVPVVVGASIISVVLVITIMCAYLIKERRKLQLIK

SEQ ID NO: 3 - DNA, 1104 bp, Oryza sativa
atggcaaagatgatgctttaccttcttctcctgccattgctcctcctcacatgcatctttgcatcttatgttcattcgatggaatcaagcacctccaagtgctccaatattcccatcccttatccctttggtattcttggtgggaaccctgccccagcccaagggtttgagatcacatgtgcctcatctggcccgatggtacgcattaacaatatcatgtttgggattcttaacatctcgttgctggatggttttgtaagcatcttggccagtgccacttctcagcagtgcaaaaggaattctagcttcagccttgaggggaccaatttcacgttctcagatacaagaaacaaatttacagctctgggttgtgatatggtagccatgctattgaacggtagcagcgggtatagcggtggctgtgcttctttttgctccaccaaaagcaatataattgatggtatgtgctctggcgtggcttgctgccaagcaccagtaccgaaggggttaaagaagcttgagttggagttcactaacataactgggcagctcagcaggcccaaggaggtcaataatactccaacatgtggcgaggctttcatcgtggagcagaactcctatgttttctctagtgttgatctgagcaacactaacaggaacaatcctcaataccgccctgttgttcttgagtggtccattgatggtggctactgtgaggaggcgaaccgcttcatgtcatatgcctgcaaggagaactcctactgctataactcatcaaatggaattggataccgctgcaattgctcccttgggtttcaggggaacccttacttgcaagggcccgatggatgccaagatattgatgaatgcaccattaagaggccatgcacgcataagtgcatcaacacgaaagggagtttctactgcatgtgcccagcagggatgagaggtgatggcttgaaggagggcagtggctgcaatggaattggcacactgttgattggaatagttactggactagctctgctactgcttctccttgttctcatattctggacccattggcttgttaagaagagaaaacttgcgaagataagacagtaa

SEQ ID NO: 4 - protein, 367 aa, Oryza sativa
MAKMMLYLLLLPLLLLTCIFASYVHSMESSTSKCSNIPIPYPFGILGGNPAPAQGFEITCASSGPMVRINNIMFGILNISLLDGFVSILASATSQQCKRNSSFSLEGTNFTFSDTRNKFTALGCDMVAMLLNGSSGYSGGCASFCSTKSNIIDGMCSGVACCQAPVPKGLKKLELEFTNITGQLSRPKEVNNTPTCGEAFIVEQNSYVFSSVDLSNTNRNNPQYRPVVLEWSIDGGYCEEANRFMSYACKENSYCYNSSNGIGYRCNCSLGFQGNPYLQGPDGCQDIDECTIKRPCTHKCINTKGSFYCMCPAGMRGDGLKEGSGCNGIGTLLIGIVTGLALLLLLLVLIFWTHWLVKKRKLAKIRQ

SEQ ID NO: 5 - DNA, 1614 bp, Oryza sativa
atgagcctcttcgatggattacttcctctgctactaattgtgtttactatgacccctgtgatacaagcttcaaacagaactacaagccttccatctgctgccacgcttgcaggttgccaaagaagctgcagtaatctgaccatcgactatccctttggaattggatcatcccattgctctaggcagcccgatttcgagctcatctgcaacaataccacacaaccaccaaggctgttattcaagaatggcaccactgagatcattgactctcccagtactgaatatttggacgttatgttttcccattccatctccatgaaatccaatgtcagtgtgtacaacatgtcatgggatgctcctgggaaatctttcacccttggatatgctagactaaacatcaccggctgtgatttcgatatataccaggtgctcgatcaaagtggaaatgttcctgccaagctttgcaacgttacatgcccaaacaggggaatcacagaggacattgctaggcaggactgcaatggcaccggatgctgctccatcgatgttccaattcgtgctcagaccttacagcttatgtttgtccgccatggcaaaggggcggtcgaacttgacgcacaatccaaccaaagctccctgtggagcacaatcaatgtaacaacagtttacgctgtcattttgtggagaatcctggaccaaccgacgtgtgccagcaccttcgataacaggaccaactatgcctgtattagtgagcacagcaaatgcatggatggctatttcgcaccgattcttggttacaattgcttatgtgatggtgggtaccaaggaaatccatatatactagatggctgctcacgtgatagaggatataatccattccaacagaaggatgtctgcgacagaaagtgcgggagcattgatgtcccatatccatttggcctagaagaagggtgcgctgcaaggaaatcatttcagctaaactgcacaaacatgttatcgtccagcctccaactgaacgatgaataccatgtaacgtatataaatgtcagcaatgggctcatgggcgtagaagacaccacagattacaaacagtacatgtatgggatgcgtgtgacgcaggagcctcaactctatatcggatctggggaatcagcctcagtgcaatgggctgttgctaatctaacctgcctagaggcacagcaaaatatatctggatatgcttgtgttagcatcaatagcacatgcttgggtgtcaactcaacagatgattacattgggtatcggtgtagttgcacacttggcttccaaggaaatccatatatccaagatggttgccaagatattaatgaatgtttggtgccaaacaaatgtaaaggagtatgctacaatactcctggaagttaccgttgcactgcttgccctgataaaacacagtatgatatgacaacaatgcagtgcacccggacaagaagacaaagtcttatgttaggtgttgtcattggacttagctgtggcttcagcatcctacttctcagcttaggaataatgcttctcattcatagatggaaaaaagacatacaaaagcaataatgaacccagctttcttgtacaaag

SEQ ID NO: 6 - protein, 529 aa, Oryza sativa
MSLFDGLLPLLLIVFTMTPVIQASNRTTSLPSAATLAGCQRSCSNLTIDYPFGIGSSHCSRQPDFELICNNTTQPPRLLFKNGTTEIIDSPSTEYLDVMFSHSISMKSNVSVYNMSWDAPGKSFTLGYARLNITGCDFDIYQVLDQSGNVPAKLCNVTCPNRGITEDIARQDCNGTGCCSIDVPIRAQTLQLMFVRHGKGAVELDAQSNQSSLWSTINVTTVYAVILWRILDQPTCASTFDNRTNYACISEHSKCMDGYFAPILGYNCLCDGGYQGNPYILDGCSRDRGYNPFQQKDVCDRKCGSIDVPYPFGLEEGCAARKSFQLNCTNMLSSSLQLNDEYHVTYINVSNGLMGVEDTTDYKQYMYGMRVTQEPQLYIGSGESASVQWAVANLTCLEAQQNISGYACVSINSTCLGVNSTDDYIGYRCSCTLGFQGNPYIQDGCQDINECLVPNKCKGVCYNTPGSYRCTACPDKTQYDMTTMQCTRTRRQSLMLGVVIGLSCGFSILLLSLGIMLLIHRWKKDIQKQ

SEQ ID NO: 7 - DNA, 894 bp, Oryza sativa
atgggacctgtgctgctgtgcctagccatcgccgccgccaccgccgtgtgcgcagcatcatcaggagcaccaccatctcccgatgcggcggccgtcgccgttggtagctgccccacgtactccggatcaggttactcttctgcatctgacggcggcaaccaagaagagtatgatcccaataaagaaaatccgtgtaaacggtcatgtggctctatgtccattcctttcccattcgctcttctatccgcatgctctggcagtaaaagatttctcctaaactgtacatcaaataaaacacttatcggaattccgccagcgcaatatcaggtgataaatatatcattagacgatggtgtcctatttgtgaacaagccctcaaaccttggagatatcatcacaacgccaacggtggcaaacgagttacatgacttcgacttctctgggagccaaggcatttggagatgggctgtcgccaatcaaacatgtcacacagcgagaactgatcagctatcgtacgcttgcgtgagcaacaacagtttgtgtgttcatagatctactggctaccattgcaagtgctctttgggctacggaggaaatgcctatatcgaagatggctgtgaggatattgatgagtgtagtctacccaacttttgtaatggaaattgccagaacttcctagggagctacaggtgctcacattgccctcgtggttcaatttttgatcctgctaaacgtgtatgcatatatggacatggccttcatccagctggtcttctaattggacttagctgtggtattggagtcctttttcttgtagtaggtctaattttatttgttcgaaggtggaggagacatatgcaaagaaaataatgaacccagctttcttgtacaaag

SEQ ID NO: 8 - protein, 289 aa, Oryza sativa
MGPVLLCLAIAAATAVCAASSGAPPSPDAAAVAVGSCPTYSGSGYSSASDGGNQEEYDPNKENPCKRSCGSMSIPFPFALLSACSGSKRFLLNCTSNKTLIGIPPAQYQVINISLDDGVLFVNKPSNLGDIITTPTVANELHDFDFSGSQGIWRWAVANQTCHTARTDQLSYACVSNNSLCVHRSTGYHCKCSLGYGGNAYIEDGCEDIDECSLPNFCNGNCQNFLGSYRCSHCPRGSIFDPAKRVCIYGHGLHPAGLLIGLSCGIGVLFLVVGLILFVRRWRRHMQRK

SEQ ID NO: 9 - DNA, 2495 bp, Oryza sativa
atgccaactttgtacaaaaaagcaggcttaaacaatgtctccccaccgaggagcagctgtggcttctatttgcgctgcgttttatgatagtatttggctattggtactactgctgagcacggcgctggctgcagagacactcgacggtgcgcaggcagcgtcgtcgcaatgccagaacgccaccaagtgcggtggtgtagacatcgtctacccgttcggcctcagttcaagcggctgcgctatgtcgccttcctttgaagtcgactgcaacaacaccgggaatggcgtccagaagccattccttggatatgtcgagctcctcagcatcgatgtccagcttagtcaggcccgcgtgaggactcgtatatcttcttcctgctataacatctcaacccgagagatgaacttcgatgacctgtggtatgtggacctgaaggacacgccgtacaggttctcggactccgccaacaagttcactattattgggtgccgaacactggcatacatcgccgatcaggatgacgtgggcaagtacatgagcggctgtgtctccgtctgccggcgaggtgaactaacgagcctgatcaatggcacctgttctgggaaaggctgttgtcagactgccatcccaaagggcctcgattactaccaggtgtggtttgagcaaagcatgaacacgtcggggatctataatcgaaccccctgcagctacgctgtgctcatggaagcgtccaacttctccttttcaaccacctacctgacttcaccgttcgagttcaacaatacctatggcggcgaggcaccggtggtgcttgattgggctatcaacaccgccaacacttgtgaggaagctatgggaaatctcacatcctatgcttgcaaaagcgacaatgcaaagtgtatcaactcctccgatacaacaggctacatctgtaggtgccaagaaggataccaaggcaatccttaccttaaaggtcccaacggttgtcaagatattaatgaatgtcaacatggagagaattacccttgctatggagattgctacaataaacctggaagtttcgattgtgtgtgtcatgcgggtagtagtggaaatgcggcaattcaaggaggatgccgagaagacctcttatcaccgaaaacacgactggcaattggtgttgttgccagtgtattggctgtcctctttggattcctaggatgggaagtgattcgacacaaacaaaaaattaaacgacaggctctattaagacagactgatgagttttttcaacaacatggaggccagatattgctagaaatgatgaaagcagatggaaatgatgggttcaccctctacaagagaggggagatagagactgccacaaataatttcagcaaggcacatgtcattggggaaggagggcagggaacagtttataaggctgttatagatggagttgccgtcgcaataaagaagtgcaaggagattgacgagagcaggaagatggagtttgtgcaagagctggtcatactttgtcgtgttagccatcccaacattgtcaagttgcttggctgttgcctccaatttgaggcaccgatgcttgtgtatgagtttgtacagaacaaaacactgcaagagctgctagatcttcagaggagtaggcggttccatgtcacactgggaacccgcctaaggattgctgctgaatccgcagacgcactttcacatctccactctttgccacacccaatactccatggtgatgtgaagacagccaacatccttctcgcaaatggcttggttgcaaaggtgcctgattttggatgttcgacgattgataagagaactcaggctgtacccaaaggcacaccagggtatattgacccggactatctagttgagtaccgactcacaaccagaaatgatgtgtatagcttcggagtcattcttcttgagcttctaaccggtaggaggccactgtcaaaagaaagaaaaagcttaacactgatgtttcaggaggctaggtccaatggcacactcattgagctccttgacagtgacattgttgatgaaacgagcatgagagtgatcaagcgggctgcagatctagtgagtcaatgcttggttgttccgggtacgacaaggccatcaatgacactagtggcagcggagctccgccgattagcggaagcagatgaagtgaagcgaagcccacagccaccattggtgctcgaggatctgagatttatggatatgggcagtacaacgaacaccttgtatggagagagcaggacgagtggggcttatagcttggagaagaaagctgtgttgagtatagagtttgcgagatgatcgatgacccagctttcttgtacaaagttggcattataagaaagcattgcttatcaatttgttgcaacgaacaggtcactatcagtcaaaataaaatcattatttgccatccagctgatatcccctatagtgagtcgtattacatggtcatagctgtttc

SEQ ID NO: 10 - protein, 766 aa, Oryza sativa
MSPHRGAAVASICAAFYDSIWLLVLLLSTALAAETLDGAQAASSQCQNATKCGGVDIVYPFGLSSSGCAMSPSFEVDCNNTGNGVQKPFLGYVELLSIDVQLSQARVRTRISSSCYNISTREMNFDDLWYVDLKDTPYRFSDSANKFTIIGCRTLAYIADQDDVGKYMSGCVSVCRRGELTSLINGTCSGKGCCQTAIPKGLDYYQVWFEQSMNTSGIYNRTPCSYAVLMEASNFSFSTTYLTSPFEFNNTYGGEAPVVLDWAINTANTCEEAMGNLTSYACKSDNAKCINSSDTTGYICRCQEGYQGNPYLKGPNGCQDINECQHGENYPCYGDCYNKPGSFDCVCHAGSSGNAAIQGGCREDLLSPKTRLAIGVVASVLAVLFGFLGWEVIRHKQKIKRQALLRQTDEFFQQHGGQILLEMMKADGNDGFTLYKRGEIETATNNFSKAHVIGEGGQGTVYKAVIDGVAVAIKKCKEIDESRKMEFVQELVILCRVSHPNIVKLLGCCLQFEAPMLVYEFVQNKTLQELLDLQRSRRFHVTLGTRLRIAAESADALSHLHSLPHPILHGDVKTANILLANGLVAKVPDFGCSTIDKRTQAVPKGTPGYIDPDYLVEYRLTTRNDVYSFGVILLELLTGRRPLSKERKSLTLMFQEARSNGTLIELLDSDIVDETSMRVIKRAADLVSQCLVVPGTTRPSMTLVAAELRRLAEADEVKRSPQPPLVLEDLRFMDMGSTTNTLYGESRTSGAYSLEKKAVLSIEFAR

SEQ ID NO: 11 - DNA, 2460 bp, Oryza sativa
agtcaagaaaaacaaggcaatggcaatagcatttctcgagcattagaccttcccctccctttccagcattctgctgctctccaatccggcctccattgtgtagcagctagctccacgagcggcaagatgcacccgaccttgttgtgcttgccactcttggcctccttgctcctcctgtgccaccgcgcgcgcgccgagtgcgagccggcgacatgcggcaacctcaccgtcaggtacccattctggctaggcggccccaacttcaaccagtccaaccagtcgtcgccgtcgtcagctctggcctcctgtggccatccggctttcgaggtgtggtgtaacggcggcgtggcgtcgttgaggggctcgcaaatcctcgtcctcagcatcgactacaacagcagctcattcgtcgcggcacacaaaagggtcgccgacggcggcgacggcgtgtgccgcaccgacttcaacatatcgtccagcctagccctcagcccgttcacgatcagcagcagcaaccgggccatctgcttcctctacagctgcaacggcacggagccaccggagatcgacggccttgtgaacgccaccatctccagctgcagtaagcctatctacgcgtacctcggcgggatctacgaccgtgataatccaccggcgatcaaagccgggaactgcacgtactcgtacctgccggtgctgtggccggactcgccggcgaacttgacggcggggacaaactacagcccgcagttcaagaaggggttcgtgttggagtggcagaagaacgggttcggcgactgcgacgcctgtaacgggagcggcggtcagtgccggtacatcaacgattccgcggcggcgttcgcgtgcctctgctccgacggcaagctgcgccgctcgacatgccccggttcaagaagcaagagtcacataataggaatagcatgtggatcaagcggcggaatattattgattgtatctatattcatttttgcttggcacaaacgcaagaagaggaaacaaacccgagatttgaaagatctcatgcatagttcatcttcaatgcaatcatacagcaaagaccttgagttgggtggttctccccatatattcacttacgaggaacttgaagaggctactgctggatttagtgcctcgagggaacttggtgatggtggttttggaactgtttacaaaggaaagctccgggatgggagagtagttgcagtgaagcgcctttacaagaacaactacagacgagtagagcaattcctaaatgaggtagacattttgtcccgcctactgcaccagaaccttgttatcctatatggctgcacgtctcgttctagccgtgaccttctcttggtctatgagtacatcccaaatgggacagttgcagaccatctacatggaccccgtgcaggagaacgaggcctcacatggcctgtaagaatgacaattgcgatagaaacggctgaggcactggcataccttcatgcagttgaaatcatacaccgtgatgtcaagaccaacaacatattgctggacaacaacttccatgtcaaagttgcggactttggactatcgcgcctgttcccgcttgaagtcacccatgtatcaactgttccacagggcacaccagggtatgttgacccagtgtaccaccagtgctacaagctaaccgataagagtgatgtgtatagctttggtgttgtgttgatagagctaatttcctcaaaaccagctgtggacatgtccaggagccacagtgacattaacttggctaacatggctctcaacagaattcagaaccatgaagttgatcagttggttgatccagagatcggctatgagactgacagtgaaacaaagaggatggtagatctggtggccgagctggcctttcagtgcttgcagatggacagagagagcaggccaccaattaaggaggtagtggaggtcctgaattgtatcaagaacggggaatgtccagcggaaaagatgaacaagaatgcgtctccaaaggaagattcgcatctgctgaaggacagcctacagtattcgcctgactcagtaatccatagatttcatagccaatctactaaccactcggtagcatcaaactctagcggatgatgagaaactttgtattgattctgatgaaataaggataactaagttgtcccctcttggttgatggactaattaatactacaagtgtttgactatgagcttggcagaaattcagacaattggtgaatgcggtaggagaaatacagggttcaaacaatctcgtgtaatctagtgttcagtgtgttcatgatttcaggttagcgagtggtatcagggagaacacatcccattgttaccctaactagaggttgcaattttgcaagcattcctcccctttttcctatgaactgcatgtacgaatttgcaacacaaacatttggaattgcgggc

SEQ ID NO: 12 - protein, 668 aa, Oryza sativa
MHPTLLCLPLLASLLLLCHRARAECEPATCGNLTVRYPFWLGGPNFNQSNQSSPSSALASCGHPAFEVWCNGGVASLRGSQILVLSIDYNSSSFVAAHKRVADGGDGVCRTDFNISSSLALSPFTISSSNRAICFLYSCNGTEPPEIDGLVNATISSCSKPIYAYLGGIYDRDNPPAIKAGNCTYSYLPVLWPDSPANLTAGTNYSPQFKKGFVLEWQKNGFGDCDACNGSGGQCRYINDSAAAFACLCSDGKLRRSTCPGSRSKSHIIGIACGSSGGILLIVSIFIFAWHKRKKRKQTRDLKDLMHSSSSMQSYSKDLELGGSPHIFTYEELEEATAGFSASRELGDGGFGTVYKGKLRDGRVVAVKRLYKNNYRRVEQFLNEVDILSRLLHQNLVILYGCTSRSSRDLLLVYEYIPNGTVADHLHGPRAGERGLTWPVRMTIAIETAEALAYLHAVEIIHRDVKTNNILLDNNFHVKVADFGLSRLFPLEVTHVSTVPQGTPGYVDPVYHQCYKLTDKSDVYSFGVVLIELISSKPAVDMSRSHSDINLANMALNRIQNHEVDQLVDPEIGYETDSETKRMVDLVAELAFQCLQMDRESRPPIKEVVEVLNCIKNGECPAEKMNKNASPKEDSHLLKDSLQYSPDSVIHRFHSQSTNHSVASNSSG

SEQ ID NO: 13 - DNA, 2362 bp, Oryza sativa
ggtggttcgctctcttcatctctccaaagtccactccaccctccgcttgcacggatgcaaacaagaatctgccggcaaccttaaccaccctctccttccttgttgtctcgttgatatcttctttctctcctccgatgcgatgcatcctgctttgctactgctccccctcgcctccttgctgcatgccgcggcagcaattggccacaacgagaccagcaccagtggcaacacaagctgcacgccggcgagatgcgggaacctgaccatcagttaccccttctcgctcagcggcgtgcagccggtgtcctgcggctacccggtgttggacctcacctgcgacaaccgaaccggccgcgcgttcctcagcaggacgttcagggaccacctgtttcgcgtggacagtattttctacgagaataactcgctggtggcggccgtagagaccaccttcgccggcgacgccgactgccccgtcccggatttcaacgtgacatccagcctcagtccctacccgttcatcatcagcaacaccaacaagtatctcgcattcatctatgactgctcgattcctgaacacgttgggcagctgcaacggccatgtggaaaccggacgatgggagcttacatctccgacaagtggaacagcacaccaccgtccggggttcgagggaactgcaactctgtcagcgtgccggtgcgtgggtactatgatggaatgaagccggtgagtggacactacgagcaattgatcaaagatgggttcgtcttggaatggatgaggtcggtaatgggagatcaagactgcgatgggtgcagaaggagaggcggggagtgcaggttcgaacagctttcgttccagtgcttctgccccgacgggttgctctgctccaattcaacccgtaccaacacaacgtcaagccatccatcaggcaaggttaatcgaggaatcaagattgccgcaggaaccgcagcggctgttgtatgtctcggtatacttggcgttggctccactgtgttgtatacccggaggaagaggaaaagatctgcatcctttgaaggtctcatccatggagggacgccattgccatcactcacgaaagaattcagcctcgccggcttggcatatacccacatcttcacctacgaggagctcgacgaggctaccgacggcttcagcgacgcccgggagctcggcgtcggcggcttcggcacagtgtacaaagggatactccggaatggggacacggtggcggtgaagcggctgtacaagaacagctacaagagcgtggagcaattccagaacgaggtgggcatcctgtcgcggctgcgccacccaaacctcgtcacgctcttcggctgcacgtcgcagaccaacagccgcgacctgctcctcgtctacgagttcgtccccaacggcacgctcgccgaccacctgcacggcggcgcggcggcgcggtcgtcctccctcgactggccgacgcggctcggcatcgccgtcgagacggccagcgcgctggagtacctccacacggtggagccgcaggtggtgcaccgcgacgtgaagacgaacaacatcctcctcgacgaagggttccacgtgaaggtggccgacttcggcctctcccggctgttcccggcggacgccacgcacgtgtccacggcgccgcagggcacgccggggtacctcgacccgatgtaccaccagtgctaccagctgacggacaagagcgacgtgtacagcttcggcgtggtgctcgtcgagctcatctcctccaagccggcggtggacatgaaccggcgcggcggcgacgtcaacctggccaacatggccgtgcacatgatccagagctacgagatggagcagctggtggacccgcagctcgggtacgcgtcggacggcgagacgaggaggacggtcgatctcgtcgccgaggtggcgttccggtgcttgcagccggagcaggacgtgaggccgccgatcggtgaggtgttggacgcgctgagagaagctcagcggatggacaaggtaggctacgtcaaggacgacgccgggctggtcaagaagagccgagacggctctccggactgcgtcatgtaccagtggattagcccatccaccacttccaataacagcagctgagacttgacaagatgttcagaaaatactggctactgactgcagacaccgtaaatattcagagttgtgtgctattgtttgtcagagaaagagaggtttcccatgaaaagaaaaaagacatagaggtttatgtgtctttggctgtaactgagttaacttgttggccagtggtttggctactttggcacattcagaaaagcagtttgatgatctgttagagaagtt

SEQ ID NO: 14 - protein, 666 aa, Oryza sativa
MHPALLLLPLASLLHAAAAIGHNETSTSGNTSCTPARCGNLTISYPFSLSGVQPVSCGYPVLDLTCDNRTGRAFLSRTFRDHLFRVDSIFYENNSLVAAVETTFAGDADCPVPDFNVTSSLSPYPFIISNTNKYLAFIYDCSIPEHVGQLQRPCGNRTMGAYISDKWNSTPPSGVRGNCNSVSVPVRGYYDGMKPVSGHYEQLIKDGFVLEWMRSVMGDQDCDGCRRRGGECRFEQLSFQCFCPDGLLCSNSTRTNTTSSHPSGKVNRGIKIAAGTAAAVVCLGILGVGSTVLYTRRKRKRSASFEGLIHGGTPLPSLTKEFSLAGLAYTHIFTYEELDEATDGFSDARELGVGGFGTVYKGILRNGDTVAVKRLYKNSYKSVEQFQNEVGILSRLRHPNLVTLFGCTSQTNSRDLLLVYEFVPNGTLADHLHGGAAARSSSLDWPTRLGIAVETASALEYLHTVEPQVVHRDVKTNNILLDEGFHVKVADFGLSRLFPADATHVSTAPQGTPGYLDPMYHQCYQLTDKSDVYSFGVVLVELISSKPAVDMNRRGGDVNLANMAVHMIQSYEMEQLVDPQLGYASDGETRRTVDLVAEVAFRCLQPEQDVRPPIGEVLDALREAQRMDKVGYVKDDAGLVKKSRDGSPDCVMYQWISPSTTSNNSS

SEQ ID NO: 15 - DNA, 2968 bp, Oryza sativa
tttcttcacctacccaatctaacatggagtactgccttaacccaaactctcccaattcccctcttcaaacaactacgccgcctccatgagctccatcacggtgcttcgctggtgctggcgccttgttctccgctcttccccttgtcttcttcgcgctctatccttcaccaccgcctccgacaaccctatgctgcctctacaggcgacttctccatctccggcatccttctcgccaggcggacggacggttggtttgcttatggaaggtggatttgttggtgagtgagtgaccatgcagtggaggcatcctccgcgggggctaaggtgaggcagattcgccggggacatggagtcatgcgtctgcgcgtgcgcgtggccaactgcgcctaccgtggtggcactcttcgccaccggttatgaagaaggggtggctgaggcgcctcatgatgtcgatcccatgacaaatgggcatgtggtttttcaaagagtggagaacaactgtagcctaagatattttacggaaaatgagatacggcaaatcacccgtggttatagcattttactgggaaaaggttcattcggtaaagtctacaaaggaatgctggatggtcgatgccctgttgctgtgaagcgatacatacatggaacccggaaagaggagtttgccaaggaggtgatagtacattctcaaataaatcacaagaatgttgttcgacttttgggctgctgcacggaggaaaatgctctaatgatcgttatggagtttatctgtaatgggaacctgaatgatatccttcattgcagcaacacaaatggacgtgttcctttctctttgggcaaacgtttagacattgccattgaggttgctgaagtgctctggtgcatgcattcaatgtataatcccgttctccatggtgacatcaaacctgctaatatacttgtggatgaaaatctttcaccaaagctatctgattttggaatagcaagattgctttgtgctaatggggctcaacatactaacaatatcattggatctataggttatgttgatcctgcattctgcatgaatggaattctaaccccaaagagtgatgtttacagctttggagtggttttgctggaaatcatcaccagaaaaaaagcagtggatgggaccatcacccttgctcagcgtttcactgaggctgttgaacaagggaagaaggtgatgcatttgtttgacgaggacatcaacaatacaaaaaacatgaacttcctcgaagatattggcaagttagcagttaaatgcttgaggagggaggttgaagtgcgtcctgaaatggttgaagtagcaactagtctaagaatgattaggaaagctctagaggaagaagagggaaatctgattcagcagaacataagtgcaccaagcaactcaattccttcaaagaatgtgaagtcatcagcacagcaatttggcaatctaaaaatctttaaacaagaggaaattaagcttatgacaaaaaactacagcatgaaatttagggaagagttctgtgaacggctgtacaatggagtcattggcacaacacatgcagttatagtaaagcaagtgagaacatcttcagaaagtgacagaatgatgtttctgaagactatgagcatactgtctcagaagtatcacaaaaatattgccaatgttgctggcttccacttaggggattccatttcagagtgtgtgtatgaatcttgctgtgatttatcccagggaaatgacggccatgtttgcttctgtaaccgaaacctttatgacattatctgcaccagggaaaaactcccccttcatctacgtttatcaatagccgtccagtgtgcagagggcctggttcatatccattcattgttagctgaaaatcctgattcacattctacaggcctcttgggaaacttcaggtcgatcaatatttttctggacaagaacttcgtgccaaaagtcttcaattctaatttatcaacatttcttgggctttcagtcatgcagaaacataccgcctctgtcgatcgtcctaatgaccaaagatcacaaatatattatttagatggaagggatatttctggtcagctgttcaatcccaagtctgatgtttatagctttggagctgttcttttggaactcatcacttggaagacagtgagatacatgtctagtggaagagttcacatgcttaccaaagacttccttgatacttatagaatagaccatagtgcagcgatatcttttggcaagaaggtttatgatgagcaagctagtggtgacaacaaaccaaaccaacatgtagcccctccccttaccaagaagtttgtcaaaactccaccaactattgtatcgatcattcccctgaacatattggagaagataactagcaacttcagtaatgatgccctaataggagagggcccagacgccagagttttctttggagagcttagtgatgggcagaaatctgcaataaagaagcttgatcctaatgaaaaaattgtagtgcaggttttgaccatttcaagaatgttgaagcatgacaacattgtccaaattcttggatattttattgaaggggaaaatcgtgttcttgcttatgagtatgcaccaaagggttccttgcacgatattcttcatgagggtgtcagaggagcccagccaggaacacctctatcatgggagcagcgagtgaagattgctctaagtgctgcaaaagggcttgagttcctccacgagaaggctgtgcctcctgtcatccacaccaacatcaggtccaacaacatatttatctttggcaatgatgttgcaaaaataggtgacctcggcgtctccaagcagctttatcctgaaagtgataatgactactacaatacccgactatatcctctgcgcagttttggctatgatgcaattgcaccagagtatgcaatgaaagatttccatgcttga

SEQ ID NO: 16 - protein, 873 aa, Oryza sativa
MESCVCACAWPTAPTVVALFATGYEEGVAEAPHDVDPMTNGHVVFQRVENNCSLRYFTENEIRQITRGYSILLGKGSFGKVYKGMLDGRCPVAVKRYIHGTRKEEFAKEVIVHSQINHKNVVRLLGCCTEENALMIVMEFICNGNLNDILHCSNTNGRVPFSLGKRLDIAIEVAEVLWCMHSMYNPVLHGDIKPANILVDENLSPKLSDFGIARLLCANGAQHTNNIIGSIGYVDPAFCMNGILTPKSDVYSFGVVLLEIITRKKAVDGTITLAQRFTEAVEQGKKVMHLFDEDINNTKNMNFLEDIGKLAVKCLRREVEVRPEMVEVATSLRMIRKALEEEEGNLIQQNISAPSNSIPSKNVKSSAQQFGNLKIFKQEEIKLMTKNYSMKFREEFCERLYNGVIGTTHAVIVKQVRTSSESDRMMFLKTMSILSQKYHKNIANVAGFHLGDSISECVYESCCDLSQGNDGHVCFCNRNLYDIICTREKLPLHLRLSIAVQCAEGLVHIHSLLAENPDSHSTGLLGNFRSINIFLDKNFVPKVFNSNLSTFLGLSVMQKHTASVDRPNDQRSQIYYLDGRDISGQLFNPKSDVYSFGAVLLELITWKTVRYMSSGRVHMLTKDFLDTYRIDHSAAISFGKKVYDEQASGDNKPNQHVAPPLTKKFVKTPPTIVSIIPLNILEKITSNFSNDALIGEGPDARVFFGELSDGQKSAIKKLDPNEKIVVQVLTISRMLKHDNIVQILGYFIEGENRVLAYEYAPKGSLHDILHEGVRGAQPGTPLSWEQRVKIALSAAKGLEFLHEKAVPPVIHTNIRSNNIFIFGNDVAKIGDLGVSKQLYPESDNDYYNTRLYPLRSFGYDAIAPEYAMKDFHA

SEQ ID NO: 17 - DNA, 2697 bp, Oryza sativa
caatgtatagtcctgttcttcatggtgatgtgaaacctgctaatatactgttagatgaaaaccactcaccaaagatatctgattttggaatagcaagattgctttgtgctaatggggctcaacataccaaaaatatcattggttctataggttatgttgatcctgcattctgcgagaatggaattctaaccccaaagagtgatgtttatagctttggagtggttttgctggagataatcaccagaaagaaagcagtggatgggaccatcacccttgctcaaagtttcactgatgccattgaaaaagggaagaaagtgatgaatttgtttgatgaggaaatcaacgataaacaaaacatgaacttccttgaagatattgggaagttggcagttaaatgcttgaggagggatgttaaagtgcgccctgaaatggttgaagtagcaaccagtctaagaatgattaggaaagatctggagggagaacaagggaatctgactcagcaacatacaagtacaccaaacaactcaactccctcaaagaatgaaggctcagcaggacgccaatttggcaatctaaatatcttcaaacaagaggaaattaagcatatgacaagaaactacagcatgacctttagggaagaattccatgaacgtctatacaatggagttcttggcatggttcatgcagttatagtaaaacaagtgagtacatcttcaaaaaccgaccgagaagtgtttctgaagactatgggcatactatgccagaagtatcacaaaaatgtcgctaatgttgctggctttcatttaggggaatacatttcagagtgcgtgtatgaatcttgctgtgaattatcccaggtaaataatggccatatttccttctctaaccgaaacctttatgagatcatctgctccacggaaaaacttcctcttcatgtacgtttgtcaatagctgtccagtgtttagagggcttggttcatatccattcatttttagctgaaaatcctgaatcgcgtggcacaagcctgttcggaaattttaggtcagccaatatttttctagacaagaacttcatgccaaaagttttcaatgccaacttatcaacatttctcgggctttgcgccgtgcaacaatgtactgcctctgttgattgtattcatgaccaaagatcacaaaaatattatttagacccaaaggatgtttctgatcatctgttcaaccccaagtctgatgtttatagctttggagttgttcttttggaactcattacttggaagacagcgaaatacaagtctggtggacaggctcatatgcttacgacagacttccttgatacttacagaatagaccatagtgcaacagacttttttgtcaagaaggtttatgacgaggaaggcaagtgtttccttcatgaagccattgctattggagttgagtgcctaaaacttgatgttcaaatgcgaccagaaatgagtgatgttctttcccgtctccggatcatctctgcagctcagagtatcagaagcaagctcatgggtccacaagcaaaagattgtggcgataatggacctagccaatacatagcccctacccctgtcaacaatgatgtcaaaattccttctccaccaacttctgcgtcgaccatttcgctggacatactgaagaaaataactaggaacttcagtaacaattccctaataggagaaggctcacacgctaaagttttctttggagtgcttaaagatggaaaaaattctgcagtaaagaagctcaatcctaatgaagaaactatagtgcaggtttcgaccatttcaaaaatgttgaagcatgacaatgttgtccaaattcatgagtattttattgaaggggaaaatcatgttcttgtttatgagtatgcaccaaagggctccttgcatgatattcttcatggtagagaaggtgtcacaggagcccaagcaagaccacctctatcatgggtgcagcgagtgaagattgctataactgctgcaaaagggcttgagttcctccacgagaaggccgtgcctcctgtcatccacaccaacatcaagtccagcaacatacttctctttggcaatgatgttgcgaaaataggttgagaggacagtatagtgtaaagagcgatgtctacgcctttggggttgtattgttggagcttttaactggtcgcaaagtatttgatcatacacttccgcgtggccagatgagccttgtaaaatgggctacaccaaggcttagtaaagacaaggtgaaacaatgcgtagatccaaagcttggacgagcattcccactcaaggctgttgccagggtaataatattcctaagcctggatgttactgtctgtgtttcacaattttttttacatcataattgcataagaatttcgggaagtttcatttgagatcatgttttgcctacattgaatctgaacttcgtcagcataaattatctgtagggtcaaacaatctgtttctgttcttcactttgaaaaaacagatggtttcttttgcacatgtaactcatggttagctcccatgtaaagttagatatgaggataggaagcgcaggttagttgagggccttgttaatccacataaaaccctcagcagtctatcacacgaacaagtcccattatggacatattatatttatattcaaactttcaaaattttgagtgtc

SEQ ID NO: 18 - protein, 838 aa, Oryza sativa
MYSPVLHGDVKPANILLDENHSPKISDFGIARLLCANGAQHTKNIIGSIGYVDPAFCENGILTPKSDVYSFGVVLLEIITRKKAVDGTITLAQSFTDAIEKGKKVMNLFDEEINDKQNMNFLEDIGKLAVKCLRRDVKVRPEMVEVATSLRMIRKDLEGEQGNLTQQHTSTPNNSTPSKNEGSAGRQFGNLNIFKQEEIKHMTRNYSMTFREEFHERLYNGVLGMVHAVIVKQVSTSSKTDREVFLKTMGILCQKYHKNVANVAGFHLGEYISECVYESCCELSQVNNGHISFSNRNLYEIICSTEKLPLHVRLSIAVQCLEGLVHIHSFLAENPESRGTSLFGNFRSANIFLDKNFMPKVFNANLSTFLGLCAVQQCTASVDCIHDQRSQKYYLDPKDVSDHLFNPKSDVYSFGVVLLELITWKTAKYKSGGQAHMLTTDFLDTYRIDHSATDFFVKKVYDEEGKCFLHEAIAIGVECLKLDVQMRPEMSDVLSRLRIISAAQSIRSKLMGPQAKDCGDNGPSQYIAPTPVNNDVKIPSPPTSASTISLDILKKITRNFSNNSLIGEGSHAKVFFGVLKDGKNSAVKKLNPNEETIVQVSTISKMLKHDNVVQIHEYFIEGENHVLVYEYAPKGSLHDILHGREGVTGAQARPPLSWVQRVKIAITAAKGLEFLHEKAVPPVIHTNIKSSNILLFGNDVAKIGDLGVSKQLHVEDYDYSYTRVVPQIFRYEAPECRLRGQYSVKSDVYAFGVVLLELLTGRKVFDHTLPRGQMSLVKWATPRLSKDKVKQCVDPKLGRAFPLKAVARVIIFLSLDVTVCVSQFFLHHNCIRISGSFI

SEQ ID NO: 19 - DNA, 2178 bp, Oryza sativa
atggcatcagcgatactgctcagtattgcaatcatggcacaactatcatctatatcagctcagccggctcctggatgccagtcccattgcggtgatatggaaatcccatacccatttggcattggcacagagtgtgctatcgaaccgggcttcgtaatctattgcaacaagactgctgatggatctatgaaaccattccttattaatgttgaggtcctaaatatttcgttgctccatggtcaaactagggcactaaatgccctgtcgacatattgctacaatgatgtaacaaagtcaatggaatctagccgatggtcacttgacttttcaacatggccataccggttctctaatctgcacaataagtttgtagtcattggttgcaacactctttcatacatctacaatggagagtatacgacagcatgtgcatcagtctgcgcaaaagcccctacaaatgactcatgcgatggtgttggctgctgccaaaataacatagccaagggattaaatagttataacgtcacgttcttcactgtgtacaatgattcgtcgaatttgcagtctaacccatgtagctacgcagcactggtggaaacagacacgtttaggttcaaaactgagtacgtaactactatgaagttcaatgagacatacaatggacagcagccggtggtactagactgggcaattgggaaggttggatgcaaggaggcaaacatgacttcttacgcatgccgtagcaaacatagcgagtgtgtagattcgatcaatggacctgggtatctatgtaactgcactcttgggtatcatggaaatccatacatcactgatggatgcatagatgtcaatgaatgtgagcaaaatcaaagcccatgcccaaaaggtgcaacttgtcgcaatacagaaggatggtaccattgttcttgccctgtgggaagaaagttggcaaaggaaacaaacacttgcaacccagacatcagcctgatcataggtgtcagcattggctccattgttctagtgattatcattttcttcgtgcgtataatttttgagagaagaaagcttacagatgtcaagaaaaaatacatccaggaacatggagggctgctattatttgagaagatgaaatcagaccagggacttgcatttaaggtgttcactcaagcagaactagagcaagcaacaaacaagtttgagaaaagccagattcttggacatggaggacatggcacagtgtacaagggaataactaaggataacattacagtggcaattaaaaaatgtgcactaattgatgatagacataagaaggaattcggtaaagaaatgttaatactttcacagattaaccacaagaacattgttaagctactgggttgctgtcttgaggtggatgtcccgatgctagtgtatgagttcattccaaatggaacattatttgatcttattcatggcaagaaccgtactcttcatatccctttcagttctctcctaagaattgttaatgaggcagctgaagggcttgcatttttacattcctacgcaaatccaccaattttgcatggtgacgtgaaaacatccaatatccttcttgatgagaattacatggcaaaggtatcagattttggcgcctccatattagcaccaaatgatgaagcgcagttcgtgacaatggttcaaggaacatgtggatatctggatcctgaatatctacaaacatgccagttgacagagaagagtgatgtgtatagctttggtgtggtcatcttggagatccttactgggcagatgccattgaaacttgaaggttctgagctacagaaaagcttgtcatcaagcttcctattggcaatgaaggagaataatcttgaggccatgctagatagccaaattaaaggtcatgagagcatggaactgctcagtggacttgctgagctagcgaagcaatgcttggacatgtgcagtgagaataggccatcaatgaaagacgtagctgaggagattagcagactaagaaaactttcgaaacatccttggatacagcgtgatagtgagacagagggctatctcagtggaccatcaaccagtaactttgaaattgagcaaagcactgagtacacaaggaaggacgaacaaatgcccataaacccaagcacttcgtattttatccggtga

SEQ ID NO: 20 - protein, 725 aa, Oryza sativa
MASAILLSIAIMAQLSSISAQPAPGCQSHCGDMEIPYPFGIGTECAIEPGFVIYCNKTADGSMKPFLINVEVLNISLLHGQTRALNALSTYCYNDVTKSMESSRWSLDFSTWPYRFSNLHNKFVVIGCNTLSYIYNGEYTTACASVCAKAPTNDSCDGVGCCQNNIAKGLNSYNVTFFTVYNDSSNLQSNPCSYAALVETDTFRFKTEYVTTMKFNETYNGQQPVVLDWAIGKVGCKEANMTSYACRSKHSECVDSINGPGYLCNCTLGYHGNPYITDGCIDVNECEQNQSPCPKGATCRNTEGWYHCSCPVGRKLAKETNTCNPDISLIIGVSIGSIVLVIIIFFVRIIFERRKLTDVKKKYIQEHGGLLLFEKMKSDQGLAFKVFTQAELEQATNKFEKSQILGHGGHGTVYKGITKDNITVAIKKCALIDDRHKKEFGKEMLILSQINHKNIVKLLGCCLEVDVPMLVYEFIPNGTLFDLIHGKNRTLHIPFSSLLRIVNEAAEGLAFLHSYANPPILHGDVKTSNILLDENYMAKVSDFGASILAPNDEAQFVTMVQGTCGYLDPEYLQTCQLTEKSDVYSFGVVILEILTGQMPLKLEGSELQKSLSSSFLLAMKENNLEAMLDSQIKGHESMELLSGLAELAKQCLDMCSENRPSMKDVAEEISRLRKLSKHPWIQRDSETEGYLSGPSTSNFEIEQSTEYTRKDEQMPINPSTSYFIR

SEQ ID NO: 21 - DNA, 1575 bp, Oryza sativa
atgactattcctttccccttcgggctccaagaagaatgctccgcaaatagaaaattccttctgaattgtacttccaagcaagcatttattggaggatcatacacgcaatatcaagtgacgaatatttcactagatcaagggcttctgtttgtcaacttttctcagcacgaagaggcctactcagaattggtagaaataagcagagataacatctcacagtgggtggagtcctggattgacgaattcaacgattttgacgtctctcagcattacggtatttggaagtggtttgtgaccaacatgacttgtgaaaaggctaaaaaatcatctgcttatgcctgcattagcaccaacgatattgacgagtgctcgatacccaatgattgtaagggaatgtgccacaaccaagcaggaggctacagttgcactcgttgccctcatggcacatctttcgatccagccgaaaggaaatgcacttccaccaagcaacataatattgtcttgggtatttctcactttaaccgatcccttttcaataagatcacagtcaagtggaagagaggcattcaaaagaaaattagaagggattacttccataaaaataaaggtttactattggaacaattgatttcttgtgatgacagtgttgcgcataagacaaagatattttctttagatgaattagagaaggcaacaaacaattttgactcaacacggattctcggtagtggaggccatggcactgtttacaagggcattttatctgaccaacgcgtagtagcaataaaaaaatccaaaattgtggagcagagtgagattgatcagtttgtcaatgaagttgctatgttatctcaaatcatccatcgtaatgtggtcaagctttttggctgttgcttagaatccgaggttcctctacttgtttatgagttcatatcaaatgggacactatatgatcttctccatggtaatttgcaaagcaaatgtgtattaacatggtggaatcgcatcagaattgcccttgaggctgcaagcgctcttgcctatctccattgtgctgcctcggtaccaatatttcatagagatgtgaaatctgccaatatacttctcgatgataatttcactacaaaggtttcagattttggtgcttcaagatctgtttctattgatgaaactcacgtggtcacaatagtgcaaggtacatttggatacttggatcctgaatattatcatacaggacaattaaatgagaagagtgacgtttacagttttggtgtaatacttattgagcttataacaaggaaaaggccaatcttcctcaattcaattggagaaaagcagaacctgtgtcatcactttcttcaaagacagcaaaacaataccacatcagaaatagtagatgtacaggttttggaagaagcagaccagtgggaaattgatgagattgcttcgcttgcagagatatgcttgaggcttagaggagaacagagaccaaaaatgaaagaagtggagctaaggctgcaacttctgaggagtaaagtagcaaagaagaagaatagagtagaatctattggataa

SEQ ID NO: 22 - protein, 524 aa, Oryza sativa
MTIPFPFGLQEECSANRKFLLNCTSKQAFIGGSYTQYQVTNISLDQGLLFVNFSQHEEAYSELVEISRDNISQWVESWIDEFNDFDVSQHYGIWKWFVTNMTCEKAKKSSAYACISTNDIDECSIPNDCKGMCHNQAGGYSCTRCPHGTSFDPAERKCTSTKQHNIVLGISHFNRSLFNKITVKWKRGIQKKIRRDYFHKNKGLLLEQLISCDDSVAHKTKIFSLDELEKATNNFDSTRILGSGGHGTVYKGILSDQRVVAIKKSKIVEQSEIDQFVNEVAMLSQIIHRNVVKLFGCCLESEVPLLVYEFISNGTLYDLLHGNLQSKCVLTWWNRIRIALEAASALAYLHCAASVPIFHRDVKSANILLDDNFTTKVSDFGASRSVSIDETHVVTIVQGTFGYLDPEYYHTGQLNEKSDVYSFGVILIELITRKRPIFLNSIGEKQNLCHHFLQRQQNNTTSEIVDVQVLEEADQWEIDEIASLAEICLRLRGEQRPKMKEVELRLQLLRSKVAKKKNRVESIG

SEQ ID NO: 23 - DNA, 1068 bp, Oryza sativa
atgtccccaaaactacttctcagtgttgcactagtcatgctgcatctagcgtctatatctgcgcagcctaacccttggtgcaaaaaacaatgtggtgatgtcaaaatcccttatccgtttggcattggcactggatgtgctattggtgaaggctttgagatcatttgcaacaggaatgctgatggaattgaccagccattcaccggtaacatcgaagttctagacatctcagtggtttacggtcgaagccgagtattaggctccatcaccacaaactgctacaactccagtacaggatcagcgaatgtcaattcctggtggatggatttatcaacatcgccataccgtttctctgatgcgtacaacacgtttgtagtcattgggtgcaatacgctcgcatatatctacaacggactgaacagaacatcatatacaactgcatgtgcatcagtgtgcggaggaccagaagacctgacaaatggttcatgcctcggagtgggctgctgccaaaatgccaatgccatacccaagggtttaactcgccaagatatctatttgtatactatttacaatacttcagaatcagatagttggaagttcaacccatgcagctatgctgcactggtagaaacagagtcatttagtttcagcacagagtacataactaccatgaggttcaatgatacctatgaggggcagcagccgctagtgctggactgggcaataggagatgtgtcttgcgaggtggcgaaaaacatgacttcatatgcatgccatagtgggaatagtatttgtgtggattcgaaaaacggcccagggtatctctgcaactgctcagaagggtatcaaggaaacccttacctccctgatggatgcacaggcaagttttcctcttcactctgcaattccttatccttatatcttcagttcaacgagatcttgaatgatgtacttagtgattatcttaaaggtgtaaatttaaaaccatcatttccaatgagcaaggtgatatgcaacaaaagggacgatacatcatatataggaggaattagttcttttttctattag

SEQ ID NO: 24 - protein, 355 aa, Oryza sativa
MSPKLLLSVALVMLHLASISAQPNPWCKKQCGDVKIPYPFGIGTGCAIGEGFEIICNRNADGIDQPFTGNIEVLDISVVYGRSRVLGSITTNCYNSSTGSANVNSWWMDLSTSPYRFSDAYNTFVVIGCNTLAYIYNGLNRTSYTTACASVCGGPEDLTNGSCLGVGCCQNANAIPKGLTRQDIYLYTIYNTSESDSWKFNPCSYAALVETESFSFSTEYITTMRFNDTYEGQQPLVLDWAIGDVSCEVAKNMTSYACHSGNSICVDSKNGPGYLCNCSEGYQGNPYLPDGCTGKFSSSLCNSLSLYLQFNEILNDVLSDYLKGVNLKPSFPMSKVICNKRDDTSYIGGISSFFY

SEQ ID NO: 25 - DNA, 1619 bp, Oryza sativa
atggagatgaggggaggaagaagagagagagatgtcaatgaatgcgagcagaatccaagtccatgcacaaagggtgaaacttgtcgcaatacaataggatggtactattgttctcggccttcttgccctctgggaagaaagttggcaagggaaacaaacacatgcaacccagacatcaaccttatcataggtatctgtattggctctgttgctctagtgatcaccattttcttcatgcgtttgatgtttgagcgaagaaagcttacagatgtcaagaaaaaatattttcagcaacacggaggactgatattatttgataagatgaaatcggatcagggacttgcatttaaggtgttcactcaagccgaactagaacatgcaacaaataagtttgagaaaagccagattcttggacatggaggacatggcaccgtgtacaagggtataacaaaggataacattacagtggcagttaaaaaatgtgcattgattgatgataggcataagaaggaatttggtaaagaaatgttaatcctttcacagatcaaccacaagaacattgttaagctgctgggttgctgccttgaggtggatatcccaatgctagtgtatgagttcatcccaaatggaacattatttgatcttattcatggcaagaaccgtacgtttcatatcccttttagttctctcctaagaatcgtcaatgaagcagctgaagggcttgcatttttacattcctatgcaaacccaccaattttgcatggcgatgtgaaaacctctaacatccttcttgatgagaactacatggcaaaggtgtcagattttggagcctccatattagcactaagtgatgaagaccaatttgtgacaatggttcaagggacatgtggctatctagatccggaatatctgcaaacatgccgattgacagacaagagcgatgtttacagctttggtgtggtccttttggaggtcatgactgggcagatgccattgaaatttgaaggtcctgagattcagaaaagcttgtcatcaagtttcctactggcaatgaaggagaataatcttgaggccatgttggacagtcaaattaaagatcatgagagcatggaactgctaagtgggcttgcagacatagctaagaaatgcttagacatgtgcagtgacaataggccatcaatgaaagaggtatctgaggagcttagcagactacgaaaattttcaaaacacccttggatacaacgtgatactgagatagagagctttctcagtggaccatcaactagtaacctagaaactgagcacagctatctcagtggaccatcaaccagtaactttgaaatcgagcacaacaccgagtatagaaggaaggatgaagaaatgcccataaacccaagcacttcatactttatccggtgaaaacaaattgttacaagattgtactcaagcatttccactttcgtccttaaccttattctgtccagttcgctggtgatgttttatattgcaattaggaataacttctgtttggttgcataatttgtcactgtatatgcttatgatagttgaccatgattaaatctatagtgaagtaactattatgctatatactttttttt

SEQ ID NO: 26 - protein, 472 aa, Oryza sativa
MEMRGGRRERDVNECEQNPSPCTKGETCRNTIGWYYCSRPSCPLGRKLARETNTCNPDINLIIGICIGSVALVITIFFMRLMFERRKLTDVKKKYFQQHGGLILFDKMKSDQGLAFKVFTQAELEHATNKFEKSQILGHGGHGTVYKGITKDNITVAVKKCALIDDRHKKEFGKEMLILSQINHKNIVKLLGCCLEVDIPMLVYEFIPNGTLFDLIHGKNRTFHIPFSSLLRIVNEAAEGLAFLHSYANPPILHGDVKTSNILLDENYMAKVSDFGASILALSDEDQFVTMVQGTCGYLDPEYLQTCRLTDKSDVYSFGVVLLEVMTGQMPLKFEGPEIQKSLSSSFLLAMKENNLEAMLDSQIKDHESMELLSGLADIAKKCLDMCSDNRPSMKEVSEELSRLRKFSKHPWIQRDTEIESFLSGPSTSNLETEHSYLSGPSTSNFEIEHNTEYRRKDEEMPINPSTSYFIR

SEQ ID NO: 27 - DNA, 1305 bp, Oryza sativa
atgaaggccgagcggaataacactgtcctttttgaaataaaatttgggagatacaatttcaatggggttgttattggactagttgttggtactggagttctagccctttcattagtcctaactatattactgcgaaggtggaagcgaggtattcaaaagaaaattcgaagggcatacttccgaaaaaacaaaggtcttgtcctggaacgactaatatcatcagatgaaagtgtggcacatagtacaaaaatattttctttggaggagttagaaagagcacctgaccattttaattccacacgcattcttggaaggggaggccatggaatagtttataagggtatattatcagatcagcgtgttgtagccataaaaaggtctaaaattgtagagcaaggtgagattgatcaatttgtcaatgaagtggctatcttatcccaaatcattcatcgcaatgtagttaagcttttcggttgttgttttgaatccgaggtacctttgctcgtgtatgagttcatctctaatgggacactttatgacattctacatggcgatatgagcactgaatgctcattgaaatgggatgatcgggttagaatttctctagaaactgcaagcgcccttgcttatctccattgtgctgcttcaattccaatatttcacaaagatgtcaaatctgccaatatactcttaaatgacaatttcactacaaaggtttccgattttggtgcttcaaggtctatttccattgatgaaacccatgttgtcaccattgtgcaaggtacatttgggtacttggatcccgaatactatcacacaggccagttaactgcaaagagtgatgtctatagttttggtgtaatactagttgagctcctaacaaggaagaaaccaatctttctcaattgctctggtgaaaagcaaaatctgtgtcattacttccttcaaagtttacgggataagacaacaactgatatgttggattctcaggtagttgaggaaggaaacctaggagaaattgatgagtttgtatcacttgctgaggcttgcttgagacttagaggggaagacagaccgaccatgaaagaagtggagtcaagattacagctcctaagagccaatattacaaagaagattcaagatgagtcacaaaagaacgtggaagcgatgcaattgtttccttccgtttatgactctacttctttcactcagaatgttgacatcggaatggatgctgattcattaactcagcttgcctctacatgccataccatggaacaagaacttgtttccttgactcgttaa

SEQ ID NO: 28 - protein, 434 aa, Oryza sativa
MKAERNNTVLFEIKFGRYNFNGVVIGLVVGTGVLALSLVLTILLRRWKRGIQKKIRRAYFRKNKGLVLERLISSDESVAHSTKIFSLEELERAPDHFNSTRILGRGGHGIVYKGILSDQRVVAIKRSKIVEQGEIDQFVNEVAILSQIIHRNVVKLFGCCFESEVPLLVYEFISNGTLYDILHGDMSTECSLKWDDRVRISLETASALAYLHCAASIPIFHKDVKSANILLNDNFTTKVSDFGASRSISIDETHVVTIVQGTFGYLDPEYYHTGQLTAKSDVYSFGVILVELLTRKKPIFLNCSGEKQNLCHYFLQSLRDKTTTDMLDSQVVEEGNLGEIDEFVSLAEACLRLRGEDRPTMKEVESRLQLLRANITKKIQDESQKNVEAMQLFPSVYDSTSFTQNVDIGMDADSLTQLASTCHTMEQELVSLTR

SEQ ID NO: 29 - DNA, 3428 bp, Oryza sativa
aacaaccaaccaaaaccttttgcaaaaccagcattctttgctccatgacgacgactcgtcttataccgcgggctcagtggctcaccgaaccaaattggtgccaggattaaaagccggcgaagtagcaagatatgcgcctgcttcgcctggccgccatggctcacctaccgcttttgctcctctccttcctcctcctcatcggcgtccatgcctccgtttccgatggctcgcctctcccacacacttacaacacttccatttgctccaaatcatacaagtgcggcggcgtcaatatctcatatcctttctatctttccaacgcaaccggcgaaacctatgattacactcagttttcttgcggctacaccgatttgaatatcacttgcagctgggacgggagtaagcagaccccttttatccaactcaacggagacaactatactatcctggagatcatctacgacagtcgcaccatcgtgctcgtagacaccgatgcgctccgcggcggcagctgccccagagtgcgccacaacatcaccttctcccaggccgatgagtggcttcagtacaccggcccccgtgacaacctcaccttcttcttcggctgcaaccttgtaccactaccaccaatggatccagggctgactcgttttgtagacaagaaccaaatcaactgcaaagacttcagcaactggcctgacggtggagattcattcgtgttcacctccgtcgagcttgaggcaccaatggagtacgaattggccagtcgctgccgccaggtcatcgtcgtgccggtaaatgggagtattcttaattcaagtagccagagtgcgctcccaagtggtgaatacggtcaagtgcttaagaaggggttcgagctggcatggaaatcaaggaaagataaacaatgcaacctgtgcgaacaatcccggggacagtgtgcctacagccagaacaggacattcctaggttgcttgtgcgccgatgggaaggtgagcagcacggattgcacatcaagatcgaacttgaagacaaaaattatagcaggtgtggttggcgggggattatctgcggtgttcgctcttggattaatagccaccgtcttcttcgttcgcaagagaaagcacaagaaggtgaactcgtcttccaagctcctcaagtacagcggctccggcgggacacctcgctccatgggcggcgacatggagtccggcagtgtcaaggacctgcagactcacctcttcagctacgaggagctcgaggaggccaccgattccttcaacgagaacagagagctcggtgatggcggcttcggcaccgtctacaaagggatacttcgagacgggcgcgtggtggcggtgaagcggctgtacaacaacagctaccggcgggtggagcagttcgtgaacgaggcggcgatcctgtcgcggctgcggcacccgaacctggtgatgttctacgggtgcacgtcgagccagagcagggagctgctcctggtgtacgagttcgtggccaacggcacggtggccgaccacctgcacggccaccgcgcgcaggagcgcgcgctctcgtggccgctccgcctcaacatcgccgtcgagtcggccgccgcgctcacgtacctccacgccatcgagccacccatcgtgcaccgcgacgtcaagaccaccaacatcctcctcgacgccgacttccacgtcaaggtcgctgactttggcctctcccgcctcttccccctcgacgtcacgcacgtctccaccgctccccagggcaccccaggatacgtggatccggagtatcaccaatgctaccagcttaccgacaagagcgatgtgtacagcttcggcgttgtcctggtggagctcatctcgtcgaagccggcggtggacatcacccggcagcggaacgagatcaacctggccggcatggccatcaacaggatccagaagagccagctcgaggagctcgtggacctcgagctcggctacgagtccgacccggcgacgaagaagatgatgaccatggtcgccgagctggctttccggtgcctgcagcagaacggcgagatgaggccgccgatcaaggaggtgctcgaggggctcaagggggtacaggacctatgcgtgatggagaaagatggaggcaaagacaagaagggacctgacccgccattatctcccgacacggtgcatgctcagtgggatagcaggcagacgactcctaacactagccagtgaccagcgggttattagattagaccagtatatttgccaccgaggcttaatatgtgtgttactgctattacgctgaggcgtgtgcttgttgtatgagaggtgcgagaccttttttcccccactttccaggcttccctggtgatgtgtgcatatgtgtttgttgggctaccagaacagagggaatgtacataagatgtttagagtggtgatgaccgatgatacatatggatatgtacttagtggatgttacagtttgggattggtccggccttgcatgatgcctagagataaggtactagtcacaatctgggtcatttgagctcccaaacggaaagagtttaatcagaagctagctaaaccgacaaactcacaaacatcacaacacacatttgaacaccaactggaatatcttgctccttgtgtcaaggctttagactgtgcacaaagcggcagcaaattttcagttttttgtccctcatgattacagacaataatggtacacttttacatgatggaaatcctactggcgttgcaaaacaggatgatggcgtacgtgttaatttacccatgatgttaccattgttgagattcagttcattgatggatatatgataatttactccagcagcatactgatccttctcccttatttaacagctcatattccggtcccgtaaggcataagaactgcttgaactgctggtatgttcctcgctatacgatgtaatacagttgctcgattttcatgctattgtattcagctactgctacatgaaccgcgcagaggatcacatcatatatcaccagaccaaacatcttctcctcctgaacttgtcgacatcatctgagctcattcgtggcttttcaggaacatccacagtttttgatttcccaactcgactatctaagctctttcgtgagatctgggagcactttggagcttcttggggtttctcagagcttgcaggttctgaatctttactagaagcaccctccttcatcgttatctctttaagatcaggttttgatgattttttgccaagacttgacacaaacttcttcaagtgcttgatataatcaggataaagctcaagattgcagtggccaccaccagttagccacaacggtgaatattttactttgcaaagttcccacagctgctttccatgggaacagtcaacgacatcatctgat

SEQ ID NO: 30 - protein, 697 aa, Oryza sativa
MSRLCHHGGRVLLPLLLVAAACLGDPTGDTYDTAMCGAQASITCGGVIVRYPFYLSNATRALPKYANSSTFCGYPGLEIICDGGGGGKAVMMLGNDSYTVSRIDYASLTVSLADADVANGTCPVVSHNVTIPPAPSSLHLADTVGMLIFFFRCAFGPAANAPPKPPSIHPLTCGENSEDAPTQSFLLPASPLPPGDLWHRGCSAVYGVPVLGGSLPSDANDPAWRKDGYIASLRKGFQMSWDRSDRCSRCELTSGKCGYNQNGKFLGCLCANGLVDSDACSKISDSTLRLAGSNLKTKIIAGVVGGGLSAVFALGLIATVFFVRKRKHKKVNSSSKLLKYSGSGGTPRSMGGDMESGSVKDLQTHLFSYEELEEATDSFNENRELGDGGFGTVYKGILRDGRVVAVKRLYNNSYRRVEQFVNEAAILSRLRHPNLVMFYGCTSSQSRELLLVYEFVANGTVADHLHGHRAQERALSWPLRLNIAVESAAALTYLHAIEPPIVHRDVKTTNILLDADFHVKVADFGLSRLFPLDVTHVSTAPQGTPGYVDPEYHQCYQLTDKSDVYSFGVVLVELISSKPAVDITRQRNEINLAGMAINRIQKSQLEELVDLELGYESDPATKKMMTMVAELAFRCLQQNGEMRPPIKEVLEGLKGVQDLCVMEKDGGKDKKGPDPPLSPDTVHAQWDSRQTTPNTSQ

SEQ ID NO: 31 - DNA, 2858 bp, Oryza sativa
gtgtctaaacatctgatgtgatagggatttaaaacttttagtcccatctaaatagggtctaaggactggacctccagaggcttgcttcattatataagcatagctcagttagaagagaactagaacctataggagaatcataatacaagacatacagagagatgactggagtagtaccatggatgatccttgcaaccaccctactgctagcaaccatcagcttcagtgcagcatccaggatggctaagcctagatgcagaggaacatgcggcaacctcaccattccctaccccttcggcatcggtgctggttgcttctacactgatgggttcgacgtttcatgcgaggagaaccgcacctacatgcataactcaagcagcaacatggagatctacagcctcaatctgattggagggcaggctcaagtcagcaccttcatcgccgacaagtgctccaacaacacagatggcacttcaacagatggttgggtatcaacatctactgctccttttttcacattatccagcagggctaacaagttaacggtggttggatgcaatacccttgcattcctggggggctacaacgaggaagaacagaacgttggggctgggtgcttctcgatgtgccccgacaagcagagtgtggacagtagcggccagtgctccggcatgggctgttgccagacatctattgcaccaaatctcacctccttaaacgtgacattcgacagcaggttcaacaattctgaggtgaacagcttcaacccatgcagttatgccttcgttgccgagcaagactggttcaggtttgagcctgattacctagaaggtcacaagttcacagacaagtacaaaggggttcccactgtgcttgattgggttgctggaagagaatcatgtgcccaagcgcccaagaacaggacatcatatgcctgtgttagcacgaacagcagctgcatcaactcaccaaatgctaccgggtatctctgtgcctgcaacaatgggtttgcaggcaacccgtacctggaaggagggtgccaagatatcaacgagtgcgaatctccgggtcagtactgccatggaatctgcgacaacacaattgggggctaccattgctactgcgggcctgggactcaaagtacagatccaaagagagagccctgcaatccaataacagcttcagaaagagctagactaacaaaaacgtttataggcatttcggtatgcgctattatactgcttagttgcacttttgcactactgatcgaatgccagaaaagaaagctgatgaaagaaaaagaaaggttctttcaacaaaatgggggtatgctgctgtatgagcaaatccggtcaaagcaagttgatactgtgagaatattcacaaaagaagaactagagaatgcaacagacaattttgactcaagcaaagaactaggaagaggcggtcatggcactgtatacaaggggatcctcaaagacaacagaatagtagccataaagcgctcaaagattatgaatatggttcagaaagatgaatttgtgcaagagatgattatactttcacagatcaaccacaggaatgtggtaaggcttctaggttgttgcttagaagtggaagttccaatgctggtctatgaattcatcccaaatggcactttgttcgagcatatacatggtaaatacagaacaacctccatttcactggatgctcgtctacggattgctcaggaatctgcagaagcactagcatatctacattcatcagcatcccctccaatagttcatggtgatgtcaaatctcccaacattctcctaggtgacaactacataacaaaagtgactgactttggagcatcaaggatgcttccaaaagatgaaatacagtttatgacaatggtacaggggactctaggctacctagacccagaatacttacaagagcgccagctaacacagaaaagtgatgtttatagctttggagttgtgcttctagaactaataacaggaaagactgcaatttattctgaaaatactgaagaaaagaaaagccttgcatcatccttccttctggcactgaaagagaacagacttgagtccatcttggacaggaacatattaggtgttggaacagagctgttccaagatgttgctcaactggcaaaatgctgcttgagtacaaagggggaagaacggccattaatgacagaagtagctgaaaggttaaaagcaataagaagcacctggcgtgagcaattgattgagggtgctaatgaagaaactgtatgtttgcttgaaaattcatcacagtatgacccttctaccactggacgacacggaagcttgatggcgctagatatagaaactggtagatgatgagtatgcaagtatcaataaatggttttagcagagtttcgattagcatctcctgacataaatatcttgtaaaaatatttgtgttcaagaataaaaactgcaggaaatcaatgaaaacttatatgtgacatgattttatgaggttcagtatgtcagcaacaacaatgtgccatggaatggtctgtcctaccttctttgttttttaccaggtggtttgtcctactttcaccatggaagttgccgccaatacatcgacatagaatcgcatcataaaggatgggaaaaattctctctctcaaaataaaggcccaagttacagatcatttattgaatgacaaattaaagaaggccaaaacatgattagaaattgttagacaagatagtagactaacgaagtaacaggccttttctgccacagcaatcacaatacattcatccgtgaataaactacaactgatgactgaaggtctctatcaaccttga

SEQ ID NO: 32 - protein, 737 aa, Oryza sativa
MTGVVPWMILATTLLLATISFSAASRMAKPRCRGTCGNLTIPYPFGIGAGCFYTDGFDVSCEENRTYMHNSSSNMEIYSLNLIGGQAQVSTFIADKCSNNTDGTSTDGWVSTSTAPFFTLSSRANKLTVVGCNTLAFLGGYNEEEQNVGAGCFSMCPDKQSVDSSGQCSGMGCCQTSIAPNLTSLNVTFDSRFNNSEVNSFNPCSYAFVAEQDWFRFEPDYLEGHKFTDKYKGVPTVLDWVAGRESCAQAPKNRTSYACVSTNSSCINSPNATGYLCACNNGFAGNPYLEGGCQDINECESPGQYCHGICDNTIGGYHCYCGPGTQSTDPKREPCNPITASERARLTKTFIGISVCAIILLSCTFALLIECQKRKLMKEKERFFQQNGGMLLYEQIRSKQVDTVRIFTKEELENATDNFDSSKELGRGGHGTVYKGILKDNRIVAIKRSKIMNMVQKDEFVQEMIILSQINHRNVVRLLGCCLEVEVPMLVYEFIPNGTLFEHIHGKYRTTSISLDARLRIAQESAEALAYLHSSASPPIVHGDVKSPNILLGDNYITKVTDFGASRMLPKDEIQFMTMVQGTLGYLDPEYLQERQLTQKSDVYSFGVVLLELITGKTAIYSENTEEKKSLASSFLLALKENRLESILDRNILGVGTELFQDVAQLAKCCLSTKGEERPLMTEVAERLKAIRSTWREQLIEGANEETVCLLENSSQYDPSTTGRHGSLMALDIETGR

SEQ ID NO: 33 - DNA, 2514 bp, Oryza sativa
ctcgtccgggacagtttacccacgacccaaaaaaaatgcttcttccactgatcatccttgccctgtcggcgagtcaagcggcggcggcgatgcagccgagcgagacgtgcctgcggcggtgcggcgacgtggagatcccgtacccgttcggcgtcggcagcgggtgccacctcgagaccggggactggacgttcgtgctgagctgcaaccgcagcgcggacgggcggctgcgggtgtacaactacgagatcgaggtggtggacgtgtcggtgcggcgggggcagctgcgcatctacagcgccatcaacccgtggtgctacaacggcagcacgtccgccatgaacgggcagagcaactggtggtacgacatgtccatcaccaacttccgcatcaacgacgcgctcaaccgcttcaccgtcgtcgggtgcaactccctcgcctacatcctctcgcccaacggcaccgccggtgccgaccggtacatgaccgggtgcatggccatgtgccccggcgcgggccggctggagaaggagaacggctcctgcgccggcgtggggtgctgccagacggccatcccggccggcctcaacgggtaccaggtctccttcgaggagaagttcaacacgtcggcgatcgccgggttcagccgctgcagctacgccgtgctggtcgaagcctcggcgttcgacttccgcgcctcgtacgtcaccaccgacgagttcatggcgtccaacggcggccagctgccgctggtgctcgactgggccatcgggaacaagacgtgcgaggaggccaagcggaacgcgtcggcctacgcctgcgtcagcgccaacagcgagtgcgtcgactccaggtacggccgtggccgcggctacctctgcaactgctccgccggctacgacggcaacccctacctcctcgacggctgccaagatatcaacgaatgcgacgagagcaggttcaggtacccgtgctccgttcctggcacatgtgtcaacactcccggaggattcacctgcacttgccctgacaagacgataggcaacgcttacaacggcacatgcggggataacaagtcccagctcggatggaagatcgccattggtaatccacgcatacgcatctccaatgttcttgtgaagaacgcctaaattaaacaaaactgagttactgcaggaatcagcagcggagttgtaatactgataatcaccgcgtcgtgcgtgtacatgatccacgcgaagaggaggctggccaagatcaagagggagcacttcaggcagcacggtgggctgctgctgttcgaggagatgaagtcgaggcagggcctgtcgttcgcgctcttcacccaggaggagctggagcaggcgacgaaccggttcgacgagcgcaacgtgatcggcaagggcgggaacggcacggtgtacaggggcaccatcgccaaggacaacggcgccgtggtcgccatcaagcggtgccggctggccaccgagcggcagaagaaggagttcggcaaggagatgctgatcctgtcccagatcaaccaccgcaacatcgtcaagctctacggctgctgcctcgaggtggaggtccccatgctggtgtacaagtacatccccaacggcaccctgtacaggctcatccacggcggcgagggcggcgcgtcggcgcggcgcatcccgttcgcggcgcgtgtgaggatcgcgcaccaggccgccgaggcgctggcgtatctgcactcgtgggcgtcgccgcccatcatccacggcgacgtcaagacgtccaacatactgctcgacgaggactacgcggcgaaggtgtccgacttcggggcgtcgacgctggcgccggcggacgcggcgcagttcgtcacgttcgtgcagggcacctgcgggtacctcgacccggagtacatgcggacgtgcaggctcaccgacaagagcgacgtgtacagcttcggcgtcgtgctgctggagctcctcacctgccggaaggcgctcaacctggaggagctggaggaggagaagtacctctcgtcgcagttcctcctggccgtcggagagggccggctcggcgagatcctggacccgcagatcaagggcgagcagagcatggaggtgctcgagcaggtcgccgagctggcgaagcagtgcctggagatctccggcgagaagaggccgtcgatgcgggaggtcgcggaggagctcgacaggctggggaagctgtcgctgcacccatgggggcagcccaactccggcgagctagcggcattgctcggtggatcaccgagcatggctgctgactctgatcagattgaacttagcactagcactagaaacattagtttcagtgatacggcgtatattgggatccgatctccacgctgactgcacgtttttgcgagagatagttgcaggcttgcagcgattttcagccactaggcaactttaacttagaacgagaacgatgggggttcaaatgttcaatcacgtagaacaatgagcactgaatttctgc

SEQ ID NO: 34 - protein, 385 aa, Oryza sativa
MIHAKRRLAKIKREHFRQHGGLLLFEEMKSRQGLSFALFTQEELEQATNRFDERNVIGKGGNGTVYRGTIAKDNGAVVAIKRCRLATERQKKEFGKEMLILSQINHRNIVKLYGCCLEVEVPMLVYKYIPNGTLYRLIHGGEGGASARRIPFAARVRIAHQAAEALAYLHSWASPPIIHGDVKTSNILLDEDYAAKVSDFGASTLAPADAAQFVTFVQGTCGYLDPEYMRTCRLTDKSDVYSFGVVLLELLTCRKALNLEELEEEKYLSSQFLLAVGEGRLGEILDPQIKGEQSMEVLEQVAELAKQCLEISGEKRPSMREVAEELDRLGKLSLHPWGQPNSGELAALLGGSPSMAADSDQIELSTSTRNISFSDTAYIGIRSPR

SEQ ID NO: 35 - DNA, 2247 bp, Oryza sativa
atgcttcttccgttgatggccgtgctgatcgcctcggcatggccggcggcagcatcgacgacgacggctgctgcacagccagccgccgcgtgccagcgccggtgcggcgacgtggacatcccctacccgttcggcatcggccgcggctgctacctctacaccggcgagggcgacgtcaccttcgggctcacctgcaaccgcaccgccgacggcagctaccgccccttctgctgggagtacgaggtcctggacgtctccctccgccgcgggcaggcgcgcgtccgcaacgacatcaaccggtggtgctacaacgccacgacccggtcgatggacgcggagagcacgtggtggtgggacgtctccgactcgtggttccatgtctccgacgagggcaaccgcctcgtcgtcgtcgggtgcaactcgctcgcgtacgtgacgtcggtgaacgagacggagtacatgaccgggtgcatggccacctgccccagcgtggggcggctggagaacgggtcgtgctccggcatgggctgctgcgaggcggccatcccgagggggatcaactcctacgtcgtggggttcgaggagaagttcaacaccacctccggcgccgtcggccggtgcagctacgccgtggtggtcgaggccgcctccttcgagttcaggacgacgtacgtcaccaccggcgacttcgtggagtccaccggcggcaaggtgcccctggtgctcgactgggtggtcggcaagaagacgtgccgggaggcgaggcggaacgccacgggctacatgtgcgtcagccgcgacagcgagtgcgtcgattcgaggaacggcccgggctacctctgcaactgctccgccggctttgaaggaaacccttacctcctcgacggatgccaagacattaacgagtgtgaggacagcagattcaagtacccgtgctctgttcctggtacctgcattaacactccaggtggattcagatgttcttgtcctgataaaacaacgggcaacgcttattttggcacatgcgaggccaagaaatctcagctcggagttcacatcgcaattggtgttagcattggcatagctctactagtaatcatcatgtcttctgcttacatgatccagcaaaagaggaggcttgccactgtaaaaaggaggtactttaaccagcatggtggtctgttgctattcgaagaaatgaagtcaaatcagggactatccttcacagtgtttaccaaggacgagctagaagaagcaacaaacaaatttgatgagcgaaatgtgctcgggaagggaggcaatggcactgtctacaggggtactctgaaagacggtagagtggttgcgatcaagaggtgcaagctaatcaacgagaggcagaagaaggagttcggcaaggaaatgctcattctgtcccagatcaaccacaggaacatcgtcaagctccatggatgctgcctagaggtggaggtccccatgcttgtctacgagttcatcccgaatggcaccttgtaccaacttatccatggcgggcgacacgggtcgcgcatttccttcgcggcgcgtctgaagatcgcgcacgaggcagccgaagcgcttgcttacctgcactcgtgggcttcacccccaatcatccatggagacgtgaaatcgcccaacatgctcatcgacgagaactacacagtgaaggtttcagactttggtgcttccacgctggctccgacagatgaagctcagttcgtcacacttgttcaggggacctgcggttacctcgatccagagtacatgcagacatgcaaactgacggataagagtgatgtgtacagcttcggcgtcgttctactagagctgctcacgtgtcgaaaggcactgaaccttcaggccctcgaggaggagaagaatctctcgtcacatttccttctagctctaagtgagaacaggctcgaggggatactggactcacagatacaaagcgaacagagcattgaactgattgaacaaatggcagatctagcgaagcagtgcctggatatgtccagtgagaagagaccctcgatgcgtcaggttgcagaggagcttgacaggctaaggaagctagcagagcatccttggggacggcatgaaagtgaggagctggagaaattgcttgttagaggatcgccaagcacgttctctgaaatagaacttagcaatgggtatgtcagcttgactgactcagcgtatttaggaatccaatctccacggtga

SEQ ID NO: 36 - protein, 748 aa, Oryza sativa
MLLPLMAVLIASAWPAAASTTTAAAQPAAACQRRCGDVDIPYPFGIGRGCYLYTGEGDVTFGLTCNRTADGSYRPFCWEYEVLDVSLRRGQARVRNDINRWCYNATTRSMDAESTWWWDVSDSWFHVSDEGNRLVVVGCNSLAYVTSVNETEYMTGCMATCPSVGRLENGSCSGMGCCEAAIPRGINSYVVGFEEKFNTTSGAVGRCSYAVVVEAASFEFRTTYVTTGDFVESTGGKVPLVLDWVVGKKTCREARRNATGYMCVSRDSECVDSRNGPGYLCNCSAGFEGNPYLLDGCQDINECEDSRFKYPCSVPGTCINTPGGFRCSCPDKTTGNAYFGTCEAKKSQLGVHIAIGVSIGIALLVIIMSSAYMIQQKRRLATVKRRYFNQHGGLLLFEEMKSNQGLSFTVFTKDELEEATNKFDERNVLGKGGNGTVYRGTLKDGRVVAIKRCKLINERQKKEFGKEMLILSQINHRNIVKLHGCCLEVEVPMLVYEFIPNGTLYQLIHGGRHGSRISFAARLKIAHEAAEALAYLHSWASPPIIHGDVKSPNMLIDENYTVKVSDFGASTLAPTDEAQFVTLVQGTCGYLDPEYMQTCKLTDKSDVYSFGVVLLELLTCRKALNLQALEEEKNLSSHFLLALSENRLEGILDSQIQSEQSIELIEQMADLAKQCLDMSSEKRPSMRQVAEELDRLRKLAEHPWGRHESEELEKLLVRGSPSTFSEIELSNGYVSLTDSAYLGIQSPR

SEQ ID NO: 37 - DNA, 2969 bp, Oryza sativa
atgagctcgagcttattagtggcagcttgcgccgtctcttttgtgctgctgtgctcggctgctacgtccccagcatcggctgcagtctacggagttggcggagggctcttgtctatcccttctaatgattccctggctcattgcccctctcgttgcggagatgttggcatcgactaccccttcgggatagcgccgggctgtttccgggaaggcttcgagctcatctgccgcaacaccgccaaaactcctaagctctttctgggtgatggtactactgagatcacagacttgggttataggtatgttttggcccagatatacttcaacattacggtgagaccaggtacggatacctacaacatatcctgggtggccccaacagagggtattactattgatcattacaacacattttacgttatcggttgtaatttcgatgctaccttgttcgagtatggcacggaggacctcataggttcttgcatgagtagatgtgatggtgaaaaggcaccaataggagggccttgtaatgggatgggatgctgtttcatcgagttaccaagggtcttgcggggctttcagtcaaccataattcttcggtcggatggcattcctgtagcacaaacagatccagtgcaccctggaatcatggctttcatgtcatcggactattatatatcaaacacaagtgaccttttcttaggttggacaaacacaagtaatgttgaaggcacagtactttcttttgctaccatagatcaaccaagctgtgaacgcgcgcgcatgaacaacacaagttatgcgtgtagccctggcagcaattgccggaatgtgtcatctggaggttatcattgttactgctctggttatgaacaggggaatccttaccttctagatggatgcacggattacaaccccaaatataaagaacactgttcaacatcctgtggagacatgaagattcctttcccttttggagtcgaagaaggttgttttgctaacgaaaggtttagacttaattgtacagaaggtaacctaactgtttgcgaattaggagaagcacaatatcatgtgactgctgtgtctttggatgatgggactctaactgtcggaaacatgatgaatgacacaaactacgagaaagaggcgataattgttcagaccacagatactgctgtgcagaagaacactacatacgcatgccgcagtagccacagctactgcctgaacgtcacccacaggaaagagttcatgggatatcgttgcaagtgttctcccggttttgaaggaaacccatacatcgaggatggctgcacagacatcaatgaatgcttactgccaaactattgcaatggcacgtgtcaaaatttacttggaaattatacatgcacaagctgcccgcatagaaaagagtttgatccaatcaaaaagaagtgtgttacatcagcaaagcaacgcaatcttcttttaggtattgcaattggaattggttgtggtcttggctccatagttatcgtgttgggggcaatgatacttgccaataagtggaggaaaggcatccaaaagagaatacggagagcatatttcaagaaaaatcaaggcctactcttggagcaactaatctcaaatgaaagcgccacaaacaaaacgaagatattttccttggaagaactagaggaggcaaccaacaactttgatggaactcgtgttcttggacgtggaggacatggcacagtttacaaaggcattctatctgaccagcgtgtggtggccattaaaaaatcaaaaatcgttgagcaaactgagatagatcaatttatcaacgaggttgttatcttatctcaaattatccaccgcaatgtggtaaagatttttggttgttgtcttgaatctgaggtgccactgctggtttatgaattcatatcgaatggcacactgcatgaccaccttcataccgatcttagtgttagatgctcgctgtcatgggatgatcgcattaggattgctgtagaagcagcaggggcactttcctatctgcattcagctgctgcaataccaatttttcatagagacgtgaaatcttccaatattctcttagatggcagctttactacaaaggtctctgattttggtgcttcaagatctgtttcacttgatgaaactcatgtggtgactattgtccaaggcacattcggttatctagacccagagtattatcatactggacaactaactgaaaaaagtgatgtatatagttttggagtgatacttgtggaacttctaataagaaagaaaccaattttcattaatgaggcaggtgcaaaacaaagcttgtctcattacttcgttgaaggacttcaagagggctctctaatggaaataatagatcctcaggttgttgaagaggcaaacaaggaagagatcgatggaattgcctcgcttacaatggcatgcttgaaagttaaaggagtagatagacctactatgaaagaagtagagatgaggctgcagttcctgaaaactaagaggctaagaaaattccaactgctcccaggaaatgatggagaaatcgagcaccttttaagcccaaatactagtaactcttatgcacagaatatttatacaaatgctggtgatttaacatctgaaggaatcccaggttctggttgctacagtctggagcaagaattatcatcttcaattagtttgccacgctaattaggtataccacggtgaagtgatatctgatatgctttgtagttccgttctgaacagggtatgctgtattgttttatttcctgtgtgtaattttaggttacagtacgtatggatagcccacgcctgttgtatattactatcattatttgtgaggaatatatggttgtaagggattaattaaggccaggtggcaaagacaaaaatttgtataatcatgaacagatccattcagtaataatttcataactcca

SEQ ID NO: 38 - protein, 940 aa, Oryza sativa
MSSSLLVAACAVSFVLLCSAATSPASAAVYGVGGGLLSIPSNDSLAHCPSRCGDVGIDYPFGIAPGCFREGFELICRNTAKTPKLFLGDGTTEITDLGYRYVLAQIYFNITVRPGTDTYNISWVAPTEGITIDHYNTFYVIGCNFDATLFEYGTEDLIGSCMSRCDGEKAPIGGPCNGMGCCFIELPRVLRGFQSTIILRSDGIPVAQTDPVHPGIMAFMSSDYYISNTSDLFLGWTNTSNVEGTVLSFATIDQPSCERARMNNTSYACSPGSNCRNVSSGGYHCYCSGYEQGNPYLLDGCTDYNPKYKEHCSTSCGDMKIPFPFGVEEGCFANERFRLNCTEGNLTVCELGEAQYHVTAVSLDDGTLTVGNMMNDTNYEKEAIIVQTTDTGRDYSFSGPVEDRFDLSMEYAIVIRWAVTNLTCEVAVQKNTTYACRSSHSYCLNVTHRKEFMGYRCKCSPGFEGNPYIEDGCTDINECLLPNYCNGTCQNLLGNYTCTSCPHRKEFDPIKKKCVTSAKQRNLLLGIAIGIGCGLGSIVIVLGAMILANKWRKGIQKRIRRAYFKKNQGLLLEQLISNESATNKTKIFSLEELEEATNNFDGTRVLGRGGHGTVYKGILSDQRVVAIKKSKIVEQTEIDQFINEVVILSQIIHRNVVKIFGCCLESEVPLLVYEFISNGTLHDHLHTDLSVRCSLSWDDRIRIAVEAAGALSYLHSAAAIPIFHRDVKSSNILLDGSFTTKVSDFGASRSVSLDETHVVTIVQGTFGYLDPEYYHTGQLTEKSDVYSFGVILVELLIRKKPIFINEAGAKQSLSHYFVEGLQEGSLMEIIDPQVVEEANKEEIDGIASLTMACLKVKGVDRPTMKEVEMRLQFLKTKRLRKFQLLPGNDGEIEHLLSPNTSNSYAQNIYTNAGDLTSEGIPGSGCYSLEQELSSSISLPR

SEQ ID NO: 39 - DNA, 2046 bp, Oryza sativa
atgagctcgagctttctggcagtttgtgccacttcttttgtgctggtgtgctcggcagctacgccacgagtattggcttcagtctatggagttggtggagggctcttgattgtcccttctaatgactccctcgctcactgcccctctagctgcggggaagtcgatggcatctcctaccccttcgggattgggggaggctgctttcgggacggcttcgagcttacctgcaacaccgccaccaaaactcccaagctccttgttgccaatagtacaacccagataacagcaatggaatatgacatggctttggctcctatgtacttcaattttacgacaaggcaaggtatggacacctacaacatttcatgggtgtcgccagctaagggtattaaaatttcagatgagaacactttctatgttgtctgttgtaattttgatgccaccttgttcgagtttggtacgggagatttcgttggttcttgtatgagtagatgtgacattgagaaggcaccaatagcaataggacagccttgtaatgggaacggatgttgctccatcaagttatcaagggacatgcggggatttcagtcaacacttgttcaagctgaagctgcagcacaaatatcagatccgctgcatcatgggatcatggctttcatgtcatatacggattattacgtacgtaatgcgagtgatcttttcttgagttggacgaatgtgagcaacgttgagggagccgagcttcagtttgccatcacggaccaaccaagctgtggaagtgcactggtaaacaaatcaagttatgcttgtaccaccggcagcaattgccaaaatatatcatcgggaggttacacctgtgagtgcaccaatcgttatctacaaggcaatccttacattttgggaggatgcaacatgcaagatcatatcacagttttggaaacaagtgaagcacaatttattgtgactaatgtgtctgttgaagatgggactctgactataagtaatttgttgaataatacggaatatgggagagagatactaataactcaaggacatggcacagtttataaagggattctatctgaccagagtgtggtggccattaaaaaatcaaaaattgtggaacaaactgagatagatcagtttatcaatgaggttgctattttatctcaaattatccatcgcaatgtggtgaagctttttggttgctgtctcgaatctgaggtgcccttactggtatatgagttcataccaaatggtacattgcatgatcgtcttcatactgatgttagtgttaaatcctcattatcatgggatgatcgaattaggattgcttcagaagcagcaggggcacttgcttatctgcattcggctgctgcaatacctattttccatcgagatgtgaaatcttccaatatactcttggatggcagctttactacaaaggtctctgactttggtgcttcaagatctgtttcactcgatgagactcatgtggtgactattgtccaaggcacatttggttatttagacccagagtattaccatactggacaactaactgaaaagagtgatgtatatagttttggagtgattctggtggaacttttgacaagaaagaaaccaattttcatcaacgatgtaggcacaaaacaaagtttgtctcattatttcgttgacagactccgtgagggatctcttatcgaaataatagattatcaggttcttgaagaggctcacagggaagacattgatgatattgcctcacttacagaggcatgcttgaaactcagaggaggagatagacctactatgaaagaagtagagatgaggctgcaattcctgagaactaagaggctaagaaaattccaatttctcccagtcccaggaagtggtggagagattcagcaccttttaagcccaaatgctggtaaatcccaagcacagaacaactataccagtgcaggtgatttatcatatgaagggatctccagttgctacagtttggagcaagaattatcatcctcagtcagtttgccacgctag

SEQ ID NO: 40 - protein, 681 aa, Oryza sativa
MSSSFLAVCATSFVLVCSAATPRVLASVYGVGGGLLIVPSNDSLAHCPSSCGEVDGISYPFGIGGGCFRDGFELTCNTATKTPKLLVANSTTQITAMEYDMALAPMYFNFTTRQGMDTYNISWVSPAKGIKISDENTFYVVCCNFDATLFEFGTGDFVGSCMSRCDIEKAPIAIGQPCNGNGCCSIKLSRDMRGFQSTLVQAEAAAQISDPLHHGIMAFMSYTDYYVRNASDLFLSWTNVSNVEGAELQFAITDQPSCGSALVNKSSYACTTGSNCQNISSGGYTCECTNRYLQGNPYILGGCNMQDHITVLETSEAQFIVTNVSVEDGTLTISNLLNNTEYGREILITQGHGTVYKGILSDQSVVAIKKSKIVEQTEIDQFINEVAILSQIIHRNVVKLFGCCLESEVPLLVYEFIPNGTLHDRLHTDVSVKSSLSWDDRIRIASEAAGALAYLHSAAAIPIFHRDVKSSNILLDGSFTTKVSDFGASRSVSLDETHVVTIVQGTFGYLDPEYYHTGQLTEKSDVYSFGVILVELLTRKKPIFINDVGTKQSLSHYFVDRLREGSLIEIIDYQVLEEAHREDIDDIASLTEACLKLRGGDRPTMKEVEMRLQFLRTKRLRKFQFLPVPGSGGEIQHLLSPNAGKSQAQNNYTSAGDLSYEGISSCYSLEQELSSSVSLPR

SEQ ID NO: 41 - DNA, 2514 bp, Oryza sativa
atgaggtcgagctttgtggcagcttgtgccatttccttagtgctagtgtgctcggctgctactacgcctcgagcattagctgcagtctatggagatggcggagggctcttgtctatcccttctaatgattccctcgctcactgcccctctagctgcggggatgttgacgacatcgcctatccctttgggattgggccgggctgcttccgggaaggcttcgagcttaagtgcaacaccagcaccaaaactcctaagctctatatgaaagatggcaccacccagatcttatatgtaggtgacgatgatctttgggcacccatgcacttcaacattacaatgaagccaggtactgatacctacaacatatcctgggtgtctcccaggaagggagttactatttctcagcgtaacaccttctacattattggttgtaatattgatgtcaccttgttcgagtatggtacgagagacgctgttggttactgcgtgagtagatgcgatggtgaaaaggtaccaacagaagggccttgtaacgggaaaggatgttgctccatcaagttatcaagggatctgcggggatttcggtcaacactagtccaagttgatgctactgcagcacaatcatatcagctgcagctgcgccatggtgttatggcttttatgtcatacaatgactattatgtagataatgcgactgatcttttcttgagttggacgaacacaagcaatatccaggaagcattagttcagtttgcaatcatggaccaaccaagttgtgaaattgctcgaatgaaaaatacgagttatgcttgtagcaccggcagcaactgcctaaatatgtcatctggaggttacacctgtgagtgcgccaattatgatctttattattattatgcagaacaaagtccttaccttttggaaggatgcatcatccgaggtaacatcacacttttcaacccacgggacgcacgttataatgtgactgatgtgtcaattgaagaggggacaatggtggttagcaacttgttgaacgacacagaatatgggggagaggacataatatcccaggtgtatggtggtgcagaaataaagtgggcagtagccaatttaacgtgtgatgccgcagtaaaaaaagatgctacatatgcatgccgcagtatccacagcaattgcctaaacgtcacccatgggaacatattcatgggatatcgttgcaagtgccttcccggttttcgagggaatccatatatccaagatggatgtgaaggtattacaactggtattagttgtggcattggttccataattattgcattaggtgcgattattctagccaataagtggaagaaaagcatccaaaagagaattagaagagcatacttcaagaaaaatcagggcctactcttggaacaactaatctcagatgaaagcgccactaataaaacaaggatattttccttggaggaactagaagaggcaaccaacaactttgatgctactcgtgttcttggtcgtggaggacatggcacagtttataaagggattctatctgaccagagtgtggtggccattaaaaaatcaaaaattgtggaacaaactgagatagatcagtttatcaatgaggttgctattttatctcaaattatccatcgcaatgtggtgaagctttttggttgctgtctcgaatctgaggtgcccttactggtatatgagttcataccaaatggtacattgcacgatcgtcttcatactgatgttagtgttaaatcctcattgtcatgggatgatcgaattaggattgcttcagaagcagcaggggcacttgcttatctgcattcggctgctgcaatacctattttccatcgagatgtgaaatcttccaatatactcttggatggcaactttactacaaaggtctctgactttggtgcttcaagatctgtttcactcgatgagactcatgtggtgactattgtccaaggtacatttggttatttagacccagagtattatcacactggacaactaactgaaaagagtgatgtatatagttttggagtgattctggtggaacttttgacaagaaagaaaccgattttcatcaatgatgtaggcacaaaacaaagtttgtctcattatttcgttgacagactccgtgagggatctcttatcgaaataatagattctcacgttcttgaagaggctcacagggaagacattgatgatattgcctcacttacagaggcatgtttaaaactcagaggaggagatagacctactatgaaagaagtagagatgaggctgcaattcctgagaactaagaggctaagaaaattccaatttctccccgtcccaggaattggtggagagattcagcaccttttaagcccagatactggtaaatcccaagcacagaacaactataccagtgcaggtgatttatcatatgaagggatctccagttgctacagtttggagcaagaattatcatcctcagtcagtttgccacgctag

SEQ ID NO: 42 - protein, 837 aa, Oryza sativa
MRSSFVAACAISLVLVCSAATTPRALAAVYGDGGGLLSIPSNDSLAHCPSSCGDVDDIAYPFGIGPGCFREGFELKCNTSTKTPKLYMKDGTTQILYVGDDDLWAPMHFNITMKPGTDTYNISWVSPRKGVTISQRNTFYIIGCNIDVTLFEYGTRDAVGYCVSRCDGEKVPTEGPCNGKGCCSIKLSRDLRGFRSTLVQVDATAAQSYQLQLRHGVMAFMSYNDYYVDNATDLFLSWTNTSNIQEALVQFAIMDQPSCEIARMKNTSYACSTGSNCLNMSSGGYTCECANYDLYYYYAEQSPYLLEGCIIRGNITLFNPRDARYNVTDVSIEEGTMVVSNLLNDTEYGGEDIISQVYGGAEIKWAVANLTCDAAVKKDATYACRSIHSNCLNVTHGNIFMGYRCKCLPGFRGNPYIQDGCEGITTGISCGIGSIIIALGAIILANKWKKSIQKRIRRAYFKKNQGLLLEQLISDESATNKTRIFSLEELEEATNNFDATRVLGRGGHGTVYKGILSDQSVVAIKKSKIVEQTEIDQFINEVAILSQIIHRNVVKLFGCCLESEVPLLVYEFIPNGTLHDRLHTDVSVKSSLSWDDRIRIASEAAGALAYLHSAAAIPIFHRDVKSSNILLDGNFTTKVSDFGASRSVSLDETHVVTIVQGTFGYLDPEYYHTGQLTEKSDVYSFGVILVELLTRKKPIFINDVGTKQSLSHYFVDRLREGSLIEIIDSHVLEEAHREDIDDIASLTEACLKLRGGDRPTMKEVEMRLQFLRTKRLRKFQFLPVPGIGGEIQHLLSPDTGKSQAQNNYTSAGDLSYEGISSCYSLEQELSSSVSLPR

SEQ ID NO: 43 - DNA, 1413 bp, Oryza sativa
atgtcgggtgccaaggttcccccttgcaacgacaaccccaagctcatggcatatgttgaatattacagtccaacaggtgctattatcgcactgccagttacaataaccacgacagcatcatgtatctactggagttttaagaaaagagagagaaatagaaaaagagctgaattgttcaagaagaatggtggcttgctgctgcagcaaagatttgctgcattcacttcccaaggcatgatggacttgtcagcaaggctatttggtgcagaagaactcaaggttgctaccgacaactacagtgaaaatcgaattcttggccgagactcatatgacaattgttcaaggaacaattggataccttacagccagctcacagagaagagtgatgtttatagcattggagttgttcttgcagagttactgactacagagaagccagtatcatttgccaggccagaggatttgcgcaagctagccatgtactatttggtaatgttggtcaacaaaggttgcatacttcaagcagtaaaaccaatcattttggcagaagccagagaagagcaactatatgatgttgcacacctctcaattatgtgcttgagtctgaagggagaacaatcaacaatgaaggaggtggcatcagttcttaatgggctgagaaggtcactggccaaggacaaagctatcaaaggaaaagaagtgtacccacaaaataagaatgaagaagaggaatacctgcttcctggatcaggggacgcggttagcagagtctccaccgcccagatcctccactcgtccggctacaccgcggcggagccagccgccctccgcgccctctccgacatcgccgggcgctacgttgcctccctgggccgcgcggcctcggccatcgccgaggcccgcggccgcacggagcccaacctcgcggacctcaccctcgcgctcgaggaccacgcgctcggcgggttccccggcgcgtccgaccccgcccgccccgtcctccgctccggcgcgctctcggagctcgctggcttcgtccgcgtggtgcgggaggtgccgttcccgaagcccgtgccgcggaggggaggggccccacgcggcaaggcgtgggagagcttcgcggcggcggggaaggagcctccgccgaagcacgtgccgcggtggctcccgcgctttcccgacaagccggagccggagcccgaaccaaaggcggcgtacgacgaggcgacggcgaggtgggaggcgcgcgttcgccacgaggaggaggcgaatgcagaagaagcggtggtattgaagccgagcgttgatggcggcggggagcgcaggggagtagtaccggagaagagggggaaagtgagcttccgcgtgcgggcggagaggaagaagcggcgggtgggattggaccagcagtga

SEQ ID NO: 44 - protein, 470 aa, Oryza sativa
MSGAKVPPCNDNPKLMAYVEYYSPTGAIIALPVTITTTASCIYWSFKKRERNRKRAELFKKNGGLLLQQRFAAFTSQGMMDLSARLFGAEELKVATDNYSENRILGRDSYDNCSRNNWIPYSQLTEKSDVYSIGVVLAELLTTEKPVSFARPEDLRKLAMYYLVMLVNKGCILQAVKPIILAEAREEQLYDVAHLSIMCLSLKGEQSTMKEVASVLNGLRRSLAKDKAIKGKEVYPQNKNEEEEYLLPGSGDAVSRVSTAQILHSSGYTAAEPAALRALSDIAGRYVASLGRAASAIAEARGRTEPNLADLTLALEDHALGGFPGASDPARPVLRSGALSELAGFVRVVREVPFPKPVPRRGGAPRGKAWESFAAAGKEPPPKHVPRWLPRFPDKPEPEPEPKAAYDEATARWEARVRHEEEANAEEAVVLKPSVDGGGERRGVVPEKRGKVSFRVRAERKKRRVGLDQQ

SEQ ID NO: 45 - DNA, 2100 bp, Oryza sativa
gatgtagtggtcgagggtgccgtttgagacaaactcataaactagcatgggaacttcgacttcaagacaacaaccgagcaacttgacgacgttcttgtggttgatctgggagaggatgcacatctccttcgcaaattccttggtctgtgcctcctctatcatctttgacttcttgatggccaccaccatgttgtcctccaggacgcctttgtagacgatgccgtagccaccgcggccaagaacacggtcggcggcaaagctgttggtggccttctcgagctcttccttggagaaaatcttgaacccacccgctccgccgctggtgccaccataggaactcatctgttgctggagaagcacgccaccgttctgctcaaagaatctttgcttcgttctgatgagcttcctcttttggagccccaggtagagccagaacaacatgaacagtaacaggaacacaccgacgctgacccctgaacatggtatgccaatgatattcattagttcccgacaagaaaataagtgcattaataatgttgcttgataaccggccgattgaatacctgtaacgactttcagagctaacgtgaacttgtccgttgggaggcatccattctcctgggttgcatttccactagtccccggtcggcattcgcaggtgtagcttccgattgtgtttgtgcattttccgaagcatgggtattcctttgtgcgttggcattcatcgatgtctagcgttggcaaagcaaaacatattcatcacttaatttttttttgtcagaaagattattactccatttgcgttttaggcacccacctttgcatccaccgtcgaggtaggggttgccctcgtagcccttggagcacctgcaccggtacccctggccgtcgctggcgttgaagcactcgctgtgcgcgctccggcacgcgtagtccgtcctgttgcgcacggcgatgtcgcagttgccggcgttccggatggcccagtcgagcacgacggggacggtgaagtcgctggttcggttgatgaaggcgcgatagctgtaggtggtgttgatccacttgtcctccgccacgaacacatactggcattttgttgagtcgagatggcggaagacgggttccgtcggcgggagctcctgttggtcggggacgtttcgcgttggttcctctgtcttattcaacgtgagtatgtaaggcttgtagacgttgagagcgcggggcatggtgttctggcagcaccccgactcgccggtgcactggcccggcaagtcaccctgcgactgcgaccgccggcacgtggatgtgcagccagtgacgtagttatcgtcggcgtcaaccaagtagccaaggacggggcacccgagcacgacaaggcggttcctcgctgtggagaaccggtaggcgatgctgcggccgtagtccggcgtgcggtagtgcccactgattgctttgaagcggtcgtcgtggcagttgcttcccgcgtcgacgaagacccggacctcgccgtcggcgatggaaaggctcaccagctttttctcacgatcatccaggtagttgaagtgcggagtgttgccgtcgcactcgagctggaagtctttgtcccgggcgcagccggcgccaatgccgaaggggtaggagatgctgatgttcccgcacttgtcggggcagcccggccatggctgagccgatgccggtgtcaccggcgccaagcagacgagcatgacggctaataagtaggcaaccgcctgatgcagtgtactagtggtagccatttctaacatgtataatcgccttcgtgttgttcttcttgccgtcttgcttttacatgccggccgggcttgatatccatataaatagatcgcgcacaagcttccttccttcgttttttggagggcaaatatgccaagatcaggaggatgtgtcatggaagctgcgtcgtgtattaggagttgactgaaagaacacgcggcgacgtgttcttttcttagagggcgcgctgtgtttagttcccaaagcaaaaaaaacttacgctgttaaaacaaaaatttttatgctgtcacatcaaatgtttgaatacatgtatagaatattaaatgt

SEQ ID NO: 46 - protein, 208 aa, Oryza sativa
MAEDGFRRRELLLVGDVSRWFLCLIQREYVRLVDVESAGHGVLAAPRLAGALARQVTLRLRPPARGCAASDVVIVGVNQVAKDGAPEHDKAVPRCGEPVGDAAAVVRRAVVPTDCFEAVVVAVASRVDEDPDLAVGDGKAHQLFLTIIQVVEVRSVAVALELEVFVPGAAGANAEGVGDADVPALVGAARPWLSRCRCHRRQADEHDG

SEQ ID NO: 47 - DNA, 315 bp, Oryza sativa
atgccccgcgctctcaacgtctacaagccttacatactcacgttgaataagacagaggaaccaacgcgaaacgtccccgaccaacaggagctcccgccgacggaacccgtcttccgccatctcgactccactgaatgccagtacgtgttcgtggcggaggacaggtggatcaacaccaactacagctatcgcgccttcttcaaccgaaccagcgacttcgccgtgcccgtcgtgctcgactgggccatccggaacgtcggcagctgcgacatcgccgggcgtcgggcgccgacggcgattaggtttgagatttga

SEQ ID NO: 48 - protein, 104 aa, Oryza sativa
MPRALNVYKPYILTLNKTEEPTRNVPDQQELPPTEPVFRHLDSTECQYVFVAEDRWINTNYSYRAFFNRTSDFAVPVVLDWAIRNVGSCDIAGRRAPTAIRFEI

SEQ ID NO: 49 - DNA, 2491 bp, Oryza sativa
agagaaacgggcaaagagttagctaaggtaggatgtcagagataaggcacctgcagccgggtgtcgccatctcagccgtagtcttgctgttaggcatggccctggcgccggcgacaccagcgtcggctcagccattgcctggctgccctgacaagtgcggcaacatcagcatcccctaccccttcggcatcggcgccgtctgtgcccgcgggcccaaattccagctcgagtgcaaccacacctactcccctccgcgcctcatcgccgtcatcgattcccaatccaatttggagatccatctcgaaagcctgtccctcgccgatggtgaggcccggatatacaacaacgcgtcgcggagcttgtacaaccacagcacgggggacctcgtccgcacaaacgacgtcgtgtacttgttcttgggacgggaaggcccttaccgcttctcgtcggccaagaaccgtttcgtcgcactcggctgccccaacctcggccttctattagacgccacagaaaattacgtgaccggttgcatatccctgtgccggtcgtcgccgctcgccgtgtcagcaggggcgtgcgccggcgtgggatgctgccagagctcgataccctccggtctccacacctactacgtgaaccaggacaagcccaagaacgtcacccttcagtattatgccgccactgattaccgctacgtgttcttggcggacgccgagtggctcagtaccagctaccgcggtgacttcaaccggaccggcgacttcgccgtgcccgtcgtgctggattgggccatccgggaagtcggcagctgcgaagccgccatgcgcaacaaggcggactacgcgtgccggagcgccaacagcgactgcgtcgactccaccgagggagaaggctaccgctgcaactgctccaggggctacgaggggaacccctacctcgacggtggatgccaagacatcgacgagtgcgagcgagataaggacgcatgcttcggcaacaagtgcaccaacacgctaggagggtacttgtgcatgtgcccgccaggtgctcgtggtaacccgctcattgaaaaaggctgcgtcaaaactgatctaggtttaactattggtattggagttggcagtggtgcggggcttttggccatggcattcggtgcagtctttttaacacgtaagatcaagaatcgtagagcaaacatgcttagacagatgttctttaagcagaaccgtgggcatttgttgcaacaattggtatctcaaaataccgacattgctgaaaggatgatcatccccttagcagaactggaaaaagccacaaacaaatttgatgaatctcgtgagattggaggaggagggcacggcaccgtttataaagggattctatcggatcttcatgttgttgcgatcaagaaatcaaaggtagcaatccaaagagagattgatgagttcataaacgaggtagccattctctcacagattaaccatcgcaatgtggtgaaactttttggatgttgcctagagacagaagtgtcattgttgatttatgaattcatatcgaatggtaccctttaccaccatcttcatgttgaagggccattatcattgtcatgggaagatagactcagaattgcaactgaaacagctagagccctcggctaccttcactcggctgtatcattccccataattcacagggacatcaagtcccataacatcttattagatggctccctaacagcaaaagtatcagactttggagcttcaaggtgtattcctgctgaacagacaggagtcacaactgttattcaaggaacactaggatacttagaccccatgtactcttacacgggacgtctcaccgagaagagcgacgtttttagctttggtgttgttctaatagagttacttactaggaaaaaaccatactcatacagatcacctgaggatgacggtcttgtttcgcatttcactacgctactcacacgtgacaacttgggtcacatacttgatcctcaagtcgtggaagagggaggaaaagaagttaaagaagtagctttgttagctgtggcatgtgtcaagctgaaagcagaggagcggcccactatgagacaggtggaaatgacacttgaaagcataagatcattgtttctgcagcaagaagctatacatagcatggccaataaaagttctaaggagaatcatgtctcaatgagttacccggcaaatgaaggcacaagtatggagtcgacaaaacagtatagccttgaagaagagtacttgctctcttcaaggtatcccaggtagtggaaatttttttaaaatataaagcgttgtcacaatgtacaaggtatgaaaggcacgcggtccaaagctatatgcacaaccgtgttttgttgatgttcatctgaatgtgtatttttgtcatctttcttccaggcgcatgaaattaacctttgtattatgttgataatttatgcaatcacattaccttc

SEQ ID NO: 50 - protein, 756 aa, Oryza sativa
MSEIRHLQPGVAISAVVLLLGMALAPATPASAQPLPGCPDKCGNISIPYPFGIGAVCARGPKFQLECNHTYSPPRLIAVIDSQSNLEIHLESLSLADGEARIYNNASRSLYNHSTGDLVRTNDVVYLFLGREGPYRFSSAKNRFVALGCPNLGLLLDATENYVTGCISLCRSSPLAVSAGACAGVGCCQSSIPSGLHTYYVNQDKPKNVTLQYYAATDYRYVFLADAEWLSTSYRGDFNRTGDFAVPVVLDWAIREVGSCEAAMRNKADYACRSANSDCVDSTEGEGYRCNCSRGYEGNPYLDGGCQDIDECERDKDACFGNKCTNTLGGYLCMCPPGARGNPLIEKGCVKTDLGLTIGIGVGSGAGLLAMAFGAVFLTRKIKNRRANMLRQMFFKQNRGHLLQQLVSQNTDIAERMIIPLAELEKATNKFDESREIGGGGHGTVYKGILSDLHVVAIKKSKVAIQREIDEFINEVAILSQINHRNVVKLFGCCLETEVSLLIYEFISNGTLYHHLHVEGPLSLSWEDRLRIATETARALGYLHSAVSFPIIHRDIKSHNILLDGSLTAKVSDFGASRCIPAEQTGVTTVIQGTLGYLDPMYSYTGRLTEKSDVFSFGVVLIELLTRKKPYSYRSPEDDGLVSHFTTLLTRDNLGHILDPQVVEEGGKEVKEVALLAVACVKLKAEERPTMRQVEMTLESIRSLFLQQEAIHSMANKSSKENHVSMSYPANEGTSMESTKQYSLEEEYLLSSRYPR

SEQ ID NO: 51 - DNA, 2853 bp, Oryza sativa
aacgagaagcaatgcagagttcagaaatgggggtgttttccagcttaggcgtcgtagtgttgctgttactgttagtcgtcgccctggcgccggtgagaccagcgtcgggtcagccattgccgggctgccccgacaggtgcggcaacatcagcgttccctaccccttcggcatcggcgcccgctgcgcccgcgacttcggctacgagctcttctgcaaccacagctacttccctccgcgcctcaccttcttccctccactccccacgcctacatcgatcttggccgggcgccggctgaatctggccagcctgtccatcgccgacggcgaggccgtagctctcgtcaacgtgttccgccagtgctacagcagcaacgagagctacgtcagcgacaactcccgtaactacacggtgtacctgtccctccttggcagcaacacctaccgcgtatccgccgcgaggaaccgcttcgtcgcgctcggctgccccaacctcggctacctcagcgacgacgcgggctactacatcaccggctgcacgtccgtctgccgaccgtcgcagtggaactccgtgtcgccggcggcgtgcaccggcgttgggtgctgccagagcaggataccacccaatgtcacctactacgaggcgtccgttcaaggcttccaggaagcccaggggagaatcttccgcgagaacacgacttcttgccggtacgcgttcgtggtggaggacaggtgggtcgacaccacctaccgggacagcgccgacttcaaccggaccgacgacttcgccgtccccgtcgtgctcgactgggccatccggaacgtcgccaactgcgacatcgccaagcgcaacaggacggactacgggtgcaggagcaccaacagcgattgcgtcgactccaccaatggtgtcggataccgctgcaagtgctccaatggctacgacggcaacccctaccttgacggtggatgcacaggtatacaatactagacaccttaatacaatgcagatattggttatcaagttaacattgaggattgttcatttgctcgccattcttatattctctgccctcaaataaataacaatcattctgacaagaagtgatgagtttgtttttcctcttccaagatattgacgagtgccaacacttagacaagtacccatgccacggagtctgcacaaatctgctgggaggctataagtgtgattgccctcatggattcagcggagatgccataaaaaatgattgccgtccaaacgacaagttcacattagcactgaaaatagtcacaggtaattttgagacactaaggaggtgtttggttcatggccacaccacacttttgactgccacagtgtgttaggtatatgtttgtttcactgccacagttgtgacttgccacattttttcaataccatgtcctacatgtcatagacttaattttttttgccaactttaacacattttgtggctagcaatttgtccaccacacttttgtggctgctacaacttacctaatgttagttgtggcaaagtgtggccagcaaccaaacacaccctaatgcacctttctctctattgattctccgatttctgatgagtgacattgcaatgccatcttcaggggtcagcgttggtgtgttcttgtcggtgttcatgtgcttttggttgtacttggggctccagaagaggaagctcatcagaacaaagcaaagattcttcgagcagaacggtggagtgatcctccagcagcagatgcactctggtggaggcactggtgggttcaaaatattttccacggaagagctcaagaaggccaccaacaacttcgccgctgaccgtgttctcggccgcggcggtcacggtgttgtctacaagggtgtcctggaggacaacatggtggtggccatcaagaagtccaagatgatggaggaggctcaaaccaaggaatttgctagagaaatgtttattctctcccagatcaatcacaggaatgtcgtcaagctgctcggttgctgcctcgaggtagaagtgcccatgttagtctatgaatttgtctcaaacggcaccctctaccactacatccatggcaaggaacccacaactgacatagcacttgataaccgtcttcggatagccgcaaagtccgccgaggcgctcgcctacatgcattcatcagcttctccaccaatcctccatggagatgtcaagacggctaacatcctacttgatgacaagctcaacgccaaagttgcagattttggagcatccaaactagcaccaactgatgaggctgcaattgccacgttggtgcagggaacttgtgggtacttggaccctgagtacctaatgacatgccagttaaccgataagagcgatgtctacagttttggtgttgtcgtgctggagcttctaaccaggaagaaggcattgtacctagacgggccagaggaagacatgagcttggtgtcacgcttcaccacagcagtgaaggctggtcgtcatcgagagcttatggacagccaagtgaggaaagagatgaacgacgaaatggcaacagagattgcagacctcctcatgcgatgcctaagcatgaacggtgaagaacgaccaacgatgaaagaggtagcagagaggttggagatgttgaggagataccagcagcacccttgggctgaagctaaaggtaatgctgaggagaatcaaagcttgcttggcattgaacatcaaaatccaaattaccaattcaggcagcatgatgttcttgatctggaagaaggaagtacatatacatttagcttgtagataatgttgtttgcgttaatcttttataaatcaatgaattcacat

SEQ ID NO: 52 - protein, 402 aa, Oryza sativa
MSDIAMPSSGVSVGVFLSVFMCFWLYLGLQKRKLIRTKQRFFEQNGGVILQQQMHSGGGTGGFKIFSTEELKKATNNFAADRVLGRGGHGVVYKGVLEDNMVVAIKKSKMMEEAQTKEFAREMFILSQINHRNVVKLLGCCLEVEVPMLVYEFVSNGTLYHYIHGKEPTTDIALDNRLRIAAKSAEALAYMHSSASPPILHGDVKTANILLDDKLNAKVADFGASKLAPTDEAAIATLVQGTCGYLDPEYLMTCQLTDKSDVYSFGVVVLELLTRKKALYLDGPEEDMSLVSRFTTAVKAGRHRELMDSQVRKEMNDEMATEIADLLMRCLSMNGEERPTMKEVAERLEMLRRYQQHPWAEAKGNAEENQSLLGIEHQNPNYQFRQHDVLDLEEGSTYTFSL

SEQ ID NO: 53 - DNA, 2241 bp, Oryza sativa
atggctaccactaccctgtgcctgcagggtgcggccctcgtcgtcttgatcgtctgcctggcgccggtggcaccagcgtgggctcagcagccggcgggctgccccgacaagtgcgggaacaccagcatcccctacccattcggcattggctcccgctgtgcccgcgacttcaacttccggctcgtttgcaaccacgcctactcgcctccgcgcctcttcgtgtctgaagtcgagctggttagcctgtccctcgacggcgaggcccgggccctcatcaacgccagaaactattgcagcgacggcacaacctacatcagttacaatgctttgaggagggacagccagggccagctgccgttgtctgatgtgtctttcggccgtagcaccgcctaccgcttctccgcggcgaggaacaggttcgtcgtgctcggttgccccgtcctcggttacctggttgacgccgaggagtactatgtcagcggctgcatatccatgtgccgcaagtcgcaagccggtaatgatcacctgccttacatcctcagcttgaataagtcggcagaggagaaccgcgtggaacccatctaccatcgcctcaactcgacggcatgcaattacatgttcctggtggaggacaagtggatcgacaccacgtacagctatcgcgcctacttcaaccgaaccgacgacttcgacgtgcccgtcgtgctcgactgggcgattcggaacgtccgcaactgcagggtcgccaagcgcaacgccaccaagtacgcgtgccggagcgagtggagcgagtgcttcgacgccagcgacggcgtcggataccggtgcaggtgctccaatggctaccagggtaacccctacctcgacagcggatgcacagacatcgacgagtgccaagacaaagagaaatacggatgctacggagactgcacaaatacgataggagggtatacttgcttatgccctcgggggactattggaaatgtccacgagaagaatgtttgccgccctaaggacaagttcacgtttgctctcaaggctgttacaggggttggcctcggcgtgttcatgtcggtgttcatggcattctggctccgccttaggcttcagaagaggaaactcatcagaacgaggcaaaagttctttgagcaaaacggtggaatctttctgcaacagcagatgcgttcctatggtggcgctggcggtggagtgggtgggttcaagattttctccacggaagaactcaagaatgcgaccaacaacttcgcagttgatcgcattcttggtcatggagggcatggcattgtttacaaaggcgtcctggaggacaacacggtggtggccatcaagaagtcaaagatgatggaggaggcccaaaccaaggagtttgcaagagaaatgttcatcctctcccagatcaaccatcgaaacgtcgtcaagctgcttggatgttgccttgaagttgaagtgcctatgttggtctatgaatttgtctcaaacggtaccttctaccactacatccatggcaaagaccccgaagttgacatagcacttgatacccgtcttcggatagcggcagagtctgccgaggcgctctcctacatgcattcgtcggcttcaccaccaatcctccatggtgatgtcaagacagcaaacatcctgcttgatgataagttcaacgccaaagtttcagattttggagcatcaaaactagcaccaactgatgaggctgagattgcaacattggtgcaaggaacttgtggatacttggaccccgaatacctaatgacatgccagctgaccgataagagtgacgtatatagttttggtgttgtcgtgctggagcttctaacaagaaagaaggcattataccttgacggaccagaggaagacaggtgcctggtgtcatgtttcaccacagctgtgaaggttggtcgtcatcaagagcttctggacagccaagtaaggaatgagctgagtgacgaaatgctccaagagattacatacctcctaatgagatgcctaagcatgattggggaagaacgaccggcgatgaaagaggtagctgagaggctggaatcgctgagaagatatcagcagcacccttgggctaaagctgaaggcaatgaggaggagattcagagcttgctcggcatggaacaaaataatgcaaattaccaactcaggcaacaagatgtcctgggtctggaagaaggcaatgcatatacatttagcttatag

SEQ ID NO: 54 - protein, 746 aa, Oryza sativa
MATTTLCLQGAALVVLIVCLAPVAPAWAQQPAGCPDKCGNTSIPYPFGIGSRCARDFNFRLVCNHAYSPPRLFVSEVELVSLSLDGEARALINARNYCSDGTTYISYNALRRDSQGQLPLSDVSFGRSTAYRFSAARNRFVVLGCPVLGYLVDAEEYYVSGCISMCRKSQAGNDHLPYILSLNKSAEENRVEPIYHRLNSTACNYMFLVEDKWIDTTYSYRAYFNRTDDFDVPVVLDWAIRNVRNCRVAKRNATKYACRSEWSECFDASDGVGYRCRCSNGYQGNPYLDSGCTDIDECQDKEKYGCYGDCTNTIGGYTCLCPRGTIGNVHEKNVCRPKDKFTFALKAVTGVGLGVFMSVFMAFWLRLRLQKRKLIRTRQKFFEQNGGIFLQQQMRSYGGAGGGVGGFKIFSTEELKNATNNFAVDRILGHGGHGIVYKGVLEDNTVVAIKKSKMMEEAQTKEFAREMFILSQINHRNVVKLLGCCLEVEVPMLVYEFVSNGTFYHYIHGKDPEVDIALDTRLRIAAESAEALSYMHSSASPPILHGDVKTANILLDDKFNAKVSDFGASKLAPTDEAEIATLVQGTCGYLDPEYLMTCQLTDKSDVYSFGVVVLELLTRKKALYLDGPEEDRCLVSCFTTAVKVGRHQELLDSQVRNELSDEMLQEITYLLMRCLSMIGEERPAMKEVAERLESLRRYQQHPWAKAEGNEEEIQSLLGMEQNNANYQLRQQDVLGLEEGNAYTFSL

SEQ ID NO: 55 - DNA, 1365 bp, Oryza sativa
atgacagaaatgactaccagtgccctgcatctgcaggtgcttgccttaaccgtcttcctcgtctgcgcggcggcagtgacaccagcggcgtcggctcagcagcagcagctgccgggctgccccgacaagtgcggcgacatcagcatcccctaccctttcgggatcggcgcccgctgcgcccgcgaccaatacttcgagctcgagtgcaaccgcgcctactcccctccgcgcctcatcgtgtctacccaccggcaacatctggtcaacctgtccctcgccgacggggaggctactgccctcatcaacgccagacgccagtgctacaacagcacggagggtttgatcggtgatgccaataattatgtcaacaaggatatcactcttgtcggcagcaatgcctaccgcttctctgcggcgaggaaccgcttcgtcgcgctcggctgcccaaacatgggctacttcgtcgacacctacggctactacgtcagcggttgcacgtccatctgccggccatcgcaggggaatggtgcgagtggtgcctcgaccgggggatgcaccggcgagggatgctgccagagcaggataccgaccaataccgactactacgagctgtacgttcaaactttcaaaccaggggaaggggaccccatattacgtggcggtacgactgcttgccggtacgtgtttctggcggaggacaagtggatcgacaccacctaccgcggccacccggacttcgaccgaaacgacgacttcgcggtgcccgtcgtgctcaactgggccatccggaacgtcggtaactgcagcgccgctactcgtaacatgacggactacgcgtgccggagcgtcaacagccactgcatcgactccattgatggccccggataccgatgcaactgctcccagggctacgagggaaacccctaccttgacggtggatgccaagggcatcaggcgagtggaccggttttgaccaggcagactgcacagtttcaaggaatcctgggagccttatccagtatttttcaaacctgaaaaggttgcatttaggcctagaagggtttgcagttagcagcagaggacaatgatctgagaccatcgtagagatagctgaaagcaagcaattttggaacctttcttcccactcatgtgagcaaaacaccctgtcaatttttgttaaggttggtatttctgtttcgctggatcaggtgtatcgacggccatttagttttatttcaataacttccaacatgtttaaagccgccctaaaagactgcatcatgcccctgttaagattgctgttatttttgtcggagtcctggacaatgaggttgaaatcatctaagatcatccacttttgattta

SEQ ID NO: 56 - protein, 344 aa, Oryza sativa
MTEMTTSALHLQVLALTVFLVCAAAVTPAASAQQQQLPGCPDKCGDISIPYPFGIGARCARDQYFELECNRAYSPPRLIVSTHRQHLVNLSLADGEATALINARRQCYNSTEGLIGDANNYVNKDITLVGSNAYRFSAARNRFVALGCPNMGYFVDTYGYYVSGCTSICRPSQGNGASGASTGGCTGEGCCQSRIPTNTDYYELYVQTFKPGEGDPILRGGTTACRYVFLAEDKWIDTTYRGHPDFDRNDDFAVPVVLNWAIRNVGNCSAATRNMTDYACRSVNSHCIDSIDGPGYRCNCSQGYEGNPYLDGGCQGHQASGPVLTRQTAQFQGILGALSSIFQT

SEQ ID NO: 57 - DNA, 2295 bp, Oryza sativa
atggctaccaataccctgcacctgcaggcgattgcattagcagcagtcttgctcatctgtcgcctttcgccggtgacaccagcagcgtcggctcagcagctgacaggctgccgcgacaagtgcggaaacatcaacgttccctaccccttcggcatcggcgcccgctgcgcccgcgatgaaggcttccagctcaactgcgacgacagcgcgtcgccaccgcgcctactcacgcttcagttcgagcaacacccgcagctcgtcagcctgtccctggccgatggcgaggcccgggtcctcctcaaaccggaaagcaagtgctaccctcctccagaagagaggtcctccgacgtccccacctcctcgtacacgtccatcaacggcagcaccacctaccgctactcgccggagaagaaccgcctcgtcgcgctcggctgccccaacctcggctacatcgtcgacggctccggcaactacgtcagcggctgcatgtccgcgtgccgccgcccgtcgctgggcaatgatacagtgccgcggttgccggggcggtgcaccggcgagcggtgctgccagagcatcataccacctaccctcaacttctacgtgccgcggatgttcaacttcgagaacgggacggcggcggtggacaacgagctccgcggcggcacgacgccgtgcaggtacgtgttcctggtggagcacacctggatcaacaccgtgtacaacgacacgaaggatttcaaccggagcgacttcgaggccgtgcccgtcgtgctcgactgggcaatccggaacgtctacaactgcagcgccgccaagcgcaacgcgacggactacgcgtgccggagcacgaacagtgagtgcttcgacaccatcgacggccagggctaccggtgcaactgctgccagggctacgagggcaacccctacctcgacggtggatgcacagatatcaacgagtgcttacgtccggaaaagtacggatgctacggagactgcacaaacatgttaggaagtcacacttgcgtgtgccctcctgggactagtggaaattggaccgacaggaacggttgccgcccaaaggacaacttccctttagctcttaaagtagttacaggggttagcgtcggtgtcttcttgtcagtgttcatgtgcttctggctctacttggggctccagaagaggaagctcatcagaacgaagcagaagttcttcgagcataacggtggagtgatcctccggcagcagatgcactccggcggaggcacccatgggttcaggatattctcgacagaagaactcaagagggcgacccacaacttcgcctctgaccgtgttctgggtcgtggtggtcacggtgttgtctataagggcgtcctcgaagacaagacagtagtggccatcaagaagtcgaagatgatggaggaggccgagaccaaggagtttgcgagagaaatgttcatcctctcccaaatcaaccatcggaatgtcgtcaagctgcttggttgctgcctcgaagttgaagtgcccatgttggtctatgaattcgtctcaaatggcaccctctaccactacatccatggcaaggaacccaaagctgacataccacttgatactcgtcttcggatagcggcagagtcagccgaggcactctcctacatgcactcatcggcttcacccccaatcctccatggagatgtcaagacggcaaacatcttgcttgatgacaagtttaacgccaaagtttctgattttggggcatcaaagctagcaccaactgatgaggccgagattgcaacgttggtgcagggaacttgcgggtacttggaccccgaataccttatgacatgccagttgactgataagagcgatgtttacagttttggtgtcgtcatgctagagcttctgacaaggaagaaagcattgtacttggacgggccagaggaaaacaggagcctggtgtcatgcttcaccacagcaatgaaagttggtcgccatcaagagctactagatagccaagtaaggaatgagatgagcgctgaaatgctagaagagatcacatacctcctgatgcgatgcataagcatgaatggagaagaacggccaacgatgaaagaggttgctgagaggctggagatgttaaggagataccagcagcacccatgggctgaagctgaagacaatgcagaggagattgagagcttgctcggcagggaacaacagaatgcaaattaccaactcgagcaacaaaatgtcttgtatttggaagaaggccgtaactatacatttagcatgtag

SEQ ID NO: 58 - protein, 764 aa, Oryza sativa
MATNTLHLQAIALAAVLLICRLSPVTPAASAQQLTGCRDKCGNINVPYPFGIGARCARDEGFQLNCDDSASPPRLLTLQFEQHPQLVSLSLADGEARVLLKPESKCYPPPEERSSDVPTSSYTSINGSTTYRYSPEKNRLVALGCPNLGYIVDGSGNYVSGCMSACRRPSLGNDTVPRLPGRCTGERCCQSIIPPTLNFYVPRMFNFENGTAAVDNELRGGTTPCRYVFLVEHTWINTVYNDTKDFNRSDFEAVPVVLDWAIRNVYNCSAAKRNATDYACRSTNSECFDTIDGQGYRCNCCQGYEGNPYLDGGCTDINECLRPEKYGCYGDCTNMLGSHTCVCPPGTSGNWTDRNGCRPKDNFPLALKVVTGVSVGVFLSVFMCFWLYLGLQKRKLIRTKQKFFEHNGGVILRQQMHSGGGTHGFRIFSTEELKRATHNFASDRVLGRGGHGVVYKGVLEDKTVVAIKKSKMMEEAETKEFAREMFILSQINHRNVVKLLGCCLEVEVPMLVYEFVSNGTLYHYIHGKEPKADIPLDTRLRIAAESAEALSYMHSSASPPILHGDVKTANILLDDKFNAKVSDFGASKLAPTDEAEIATLVQGTCGYLDPEYLMTCQLTDKSDVYSFGVVMLELLTRKKALYLDGPEENRSLVSCFTTAMKVGRHQELLDSQVRNEMSAEMLEEITYLLMRCISMNGEERPTMKEVAERLEMLRRYQQHPWAEAEDNAEEIESLLGREQQNANYQLEQQNVLYLEEGRNYTFSM

SEQ ID NO: 59 - DNA, 2370 bp, Oryza sativa
aggccacccacccgtccaattccaagcgcgcgcccggcgcctcgtcgcgcatcgcttgctcagtagctcggctcggatgagacgcctcgcgcggacgcggtagccggtttccgtgggagatgcggggcgcggcgcggctactcctgccactggtggtgctgctgctgcacgcagcacgcggatcagcgggatcgacgggcggcggaggcaacggcagctgcacgcagagctgcggccgcatgagggtgccgtacccgttcggcttctccagaggctgcacggttcagctcggctgcgacgacgcctccggcaccgcgtggctcggcgggacgcgcgggctgggcctgctcgtgagcaacgtgacgccgcgcgccatcgtcctcaccctgccccccaactgctcccgcccgctcaacgagtccctggatgcgctcttcaccgacaactacgcgcccaccgcgcagaacgccctggtcgtgagctcgtgcgacccgcaggccgccgcccgcctcagcaactgcagcatcccacccgaggcctacctcgagaagagctgcaattccatccgctgcgtcttaccttctaccaaagccaacgtcgacgggacaaacgtcacagaccctttcttgaatagaagcgagatgcggcggctcggctcggactgccgcgggctcgtgtcggcgtcgatctattcgaacacggcggggccggcgctgcagctgaccgcgctggagctggattggtgggtgcaggggcggtgcggctgctcgagccacgccatctgcgacgggttcaccccgccgtctacgcagaaggaggcgttccggtgcgagtgccaggaggggttcgagggcgacggctacaccgccggcgccggttgccggagagttccaaagtgtaatccttcaaaatacctatcaggatcatgtggcaagttggttcagatcggccttcttgtggcaggagtcttttttggagccatggtgatgggcatcacctgcttggtgtaccacctgctgcggcgccggtcggcggccctccggagccagaagagcacgaagcggctgctgtcggaggcgtcctgcacggtgcccttctacacgtaccgcgagatcgatcgcgccaccaacggcttcgccgaggaccagcgccttggcacgggcgcgtacggcacggtgtacgcggggcggctgagcaacaaccgcctcgtggccgtgaagcggatcaagcagcgcgacaacgccgggctggaccgcgtgatgaacgaggtgaagctcgtgtcgtcggtgagccaccgcaacctcgtccgcctcctcggctgctgcatcgagcacgggcagcagatcctcgtctacgagttcatgcccaacggcacgctggcgcagcacctgcagcgggagcgcggcccggccgtgccgtggacggtccgcctccgcatcgccgtcgagacggccaaggccatcgcgtacctgcactcggaggtgcacccgcccatctaccaccgcgacatcaagtccagcaacatcctgctcgaccacgagtacaactccaaggtcgccgacttcgggctgtcgcggatgggcatgacgtccgtcgactcgtcgcacatctccaccgcgccgcagggcacgccggggtacgtcgaccctcagtaccaccagaacttccacctctcggacaagagcgacgtgtacagcttcggcgtcgtgctcgtcgagatcatcacggccatgaaggccgtcgacttcagccgggttggcagcgaggtcaacctggcgcagctggccgtcgacaggatcgggaaaggcagcctcgacgacatcgtcgacccctacctagacccgcacagggacgcctggactctcacgtccatccacaaggtggccgagctggcgtttcggtgcctggcgttccacagcgagatgagaccttccatggctgaggtcgccgacgagctggaacagattcaggtcagcgggtgggcgccgtccacggatgacgccacattcatgtcaacgacgtcctcgctttgctcgtcggctccatcacgttgcacggacaagtcttgggggaccgctaagagcaagaggcaggccgcggcaaacgcagtggtaaagcaagagacgacgaagtgtgcagtcgccgactcccccgtgtccgtgcaggagagatggttcagcgataggagctccccttcctcaaatagcctgctgaggaatagctccctgaactaactcaatcaatgtccttgtcatggcattttaggtgtaagtagcattagaacgatctgtaattgatgcaatgatcccttgtgcatcgattgtcgatgtttatatctgcaatattgaatatggggttatacgtcgtggt

SEQ ID NO: 60 - protein, 704 aa, Oryza sativa
MRGAARLLLPLVVLLLHAARGSAGSTGGGGNGSCTQSCGRMRVPYPFGFSRGCTVQLGCDDASGTAWLGGTRGLGLLVSNVTPRAIVLTLPPNCSRPLNESLDALFTDNYAPTAQNALVVSSCDPQAAARLSNCSIPPEAYLEKSCNSIRCVLPSTKANVDGTNVTDPFLNRSEMRRLGSDCRGLVSASIYSNTAGPALQLTALELDWWVQGRCGCSSHAICDGFTPPSTQKEAFRCECQEGFEGDGYTAGAGCRRVPKCNPSKYLSGSCGKLVQIGLLVAGVFFGAMVMGITCLVYHLLRRRSAALRSQKSTKRLLSEASCTVPFYTYREIDRATNGFAEDQRLGTGAYGTVYAGRLSNNRLVAVKRIKQRDNAGLDRVMNEVKLVSSVSHRNLVRLLGCCIEHGQQILVYEFMPNGTLAQHLQRERGPAVPWTVRLRIAVETAKAIAYLHSEVHPPIYHRDIKSSNILLDHEYNSKVADFGLSRMGMTSVDSSHISTAPQGTPGYVDPQYHQNFHLSDKSDVYSFGVVLVEIITAMKAVDFSRVGSEVNLAQLAVDRIGKGSLDDIVDPYLDPHRDAWTLTSIHKVAELAFRCLAFHSEMRPSMAEVADELEQIQVSGWAPSTDDATFMSTTSSLCSSAPSRCTDKSWGTAKSKRQAAANAVVKQETTKCAVADSPVSVQERWFSDRSSPSSNSLLRNSSLN

SEQ ID NO: 61 - DNA, 3430 bp, Oryza sativa
ggagaagccgagcaagaaatccagccaagaaagagagagagagaaatcgcacccaaaatctcccccaactctctacgcaattccactctccaaaaccacccatcaacaaaaccaaatccaagaatcgatccagcgatcgatggagtcgtcgtcgtcggtcatcttcctgggcaccggctgctccggcgcgctccccgacgcccggtgcctcatccacccgtccacgccgccgtgccccgtctgctcccactccctctccctcccgccggagcgaaaccccaattacaggtgtaacacctccctcttgatagattactgccaacatgatggaatccataagtacattctaatcgatgtcggcaagacatttagagaacaagttcttcggtggttttctcaccacaagattccttatgttgattcgattattctcactcatgaacacgcggatgctgtcttaggtcttgatgatgtttgggtggtacaaccaagtggttgtagaaatggcttgggcaaagttcctatttttctcacccatttcacaatgaacagtgttgcagcaagattcccctatttattgaaaaataagctggaggaaggtgatgaaggttcccaagtcattcaactcgactggacgataattgagggtgacatcgacaaaccatttgtatcatcaggattagagtttgtgcccctgccagtcatgcatggagaggattatgtttgtttaggattcctatttggaaggagatccagaattgcatatttatctgatgtctcaagaattctacctagaactgagcatgcaatttcgaagtctggtgccggacaacttgatcttcttatactagaaacgaacgagttgcacggggagggagatgctggcagttgccaccttactctgagtcagactcttaatgctgtcaagagaataagtcctaagagagctctgttgattggaatgaaccatgaattcgaacatcacaaagaaaatcagacgctggcagaatggtctagcagtgaaatcattgtagaacatttcaggattataccctttgcttgtttcaaaaggaaaagaaagtttcacttgttatcgtcgtcgtccggcgtctcgtcggcggcggcggccggacgcgccatatcgctgcctgggtgccccgacaagtgcggcgacgtctccatcccctacccgttcggcgtcggcgaccgctgcgccgccgtcggcctcaacccgtacttcaacatcacctgcgacgacgccgtgaggccaccggtcccgaagctgggcgaccctggcatggaggccgaggtcctcgacatcacgctggagcgcggcgagatccgcctcaccggcttcctcagctacgtctgctacacgtcgagcaacagctcgtacgccagcctcccgggcggcatcttcgtcggcggcacgcagctccgcgtctcgccgtcgcgcaaccagctcacggtgatcgggtgcagagctcttggcctgctggtcggcggcgcccacgcgggcggctccggcgacggcgacgagtacgccaccggctgctacacctactgcgccagcctcaacagcacggacgccgacggcgcgccctgcgccgggacggggtgctgccaggcgcccatctcgtcggacctcgcctacgtcggcgggacgttcccgagcaactggacgaacagcggttggcgcttcaacccgtgcttctacgcccttatcgcggaggttgggtggtacagcttccggcggcgccacctcgccggcgtccttgggttcgtcaacgagaccaagcccagcgacatccccgtcgtcctcgattgggcggccagggacggctggtgcccggcgacggcggaggagaaggcgcggcggaagtacgcgtgcgtgagcggcaacagccactgcgtcaactcgagcaacggcatgggttactcgtgcagctgcaaccaaggctacgaaggcaacccttatcttgacaacggctgtcaagatatagacgaatgcacgctacgaagacagggtcgccaatacgaggatgtatacccatgcaagcacggtatctgcatcaatacaccaggaagctaccgttgcaaatgcaaggcaggaacaaaaccagatggcacgaattttggatgccaacaagtgctccccatggctgccaaagtgatcatagggctgagtgcgtgttccatcttcgtcatggctctgtcatgcatgctagtaatccaactgcagagaaggaagcacaccatcgagaagcaggagtacttcaggcgaaacggaggcctgaggctgtacgacgagatggtgtcgaggcaggtcgacacggtgcgcgtgctcaccgtcgacgagctcaagaaagccaccgacaacttcagcgacgcccgcgtcctcggccgcggcggccacggcacggtctaccgtggcacgctcgacgatctccgggaggtcgccatcaagaggtccaaggcggcggtcgacggcgacggcgacggcggcggctgcaaggaggagttcgtcaacgagatcatcgtgctgtcgcagatcaaccaccgccacgtcgtgcggctgctcggctgctgcctggaggtgcacgtcccgatgctggtgtacgagttcgtccccaatggcaccctgttcgacctcctccacggcgggacggcggcgcggcggcggccggtgtcgctgggcctccggctgaagatcgcggcgcagtccgcggaggcgctggcgtacctgcactcgtcggcgtcgcgcgcgatcctccacggcgacgtcaagtcgctcaacatcctgctcgacggcgcgctcgacgccaaggtcgccgacttcggcgcgtcggcgctgaggtccgccatgggcgagggcgagtcgttcatcgagtacgtgcagggcaccctgggctacctcgacccggagagcttcgtcagccgccacctcaccgacaagagcgacgtgtacagcttcggcgtcgtcctcgcggagctcatcacccgcaagaaggcggtgtacgaagacgacggcggcggcggcggaggctccggcgagaagcggtcgctgtcgtccacgttcctcgcggcctccagccggggtgagctctggagagtggtggaccgcgacatcatggacggcgacgacgtcgacgccgtggtccgggagctcgcgcgggtcgccgaggagtgcatgggagcgagaggcgaggagaggccggcgatgaaggaggtggcggagcggctgcaggtgctgaggagggtggagatgatggaggcggccgcaggtgttgaggtggtggatggcttcaatggaggaggattagttgggcggcatgggcatctggacaccacgacgacgacgacgacgtcttattaccagagcatggagacggacaagctccagctggatgttgatgatcttgtacgctag

SEQ ID NO: 62 - protein, 1096 aa, Oryza sativa
MESSSSVIFLGTGCSGALPDARCLIHPSTPPCPVCSHSLSLPPERNPNYRCNTSLLIDYCQHDGIHKYILIDVGKTFREQVLRWFSHHKIPYVDSIILTHEHADAVLGLDDVWVVQPSGCRNGLGKVPIFLTHFTMNSVAARFPYLLKNKLEEGDEGSQVIQLDWTIIEGDIDKPFVSSGLEFVPLPVMHGEDYVCLGFLFGRRSRIAYLSDVSRILPRTEHAISKSGAGQLDLLILETNELHGEGDAGSCHLTLSQTLNAVKRISPKRALLIGMNHEFEHHKENQTLAEWSSSEIIVEHFRIIPFACFKRKRKFHLLSSSSGVSSAAAAGRAISLPGCPDKCGDVSIPYPFGVGDRCAAVGLNPYFNITCDDAVRPPVPKLGDPGMEAEVLDITLERGEIRLTGFLSYVCYTSSNSSYASLPGGIFVGGTQLRVSPSRNQLTVIGCRALGLLVGGAHAGGSGDGDEYATGCYTYCASLNSTDADGAPCAGTGCCQAPISSDLAYVGGTFPSNWTNSGWRFNPCFYALIAEVGWYSFRRRHLAGVLGFVNETKPSDIPVVLDWAARDGWCPATAEEKARRKYACVSGNSHCVNSSNGMGYSCSCNQGYEGNPYLDNGCQDIDECTLRRQGRQYEDVYPCKHGICINTPGSYRCKCKAGTKPDGTNFGCQQVLPMAAKVIIGLSACSIFVMALSCMLVIQLQRRKHTIEKQEYFRRNGGLRLYDEMVSRQVDTVRVLTVDELKKATDNFSDARVLGRGGHGTVYRGTLDDLREVAIKRSKAAVDGDGDGGGCKEEFVNEIIVLSQINHRHVVRLLGCCLEVHVPMLVYEFVPNGTLFDLLHGGTAARRRPVSLGLRLKIAAQSAEALAYLHSSASRAILHGDVKSLNILLDGALDAKVADFGASALRSAMGEGESFIEYVQGTLGYLDPESFVSRHLTDKSDVYSFGVVLAELITRKKAVYEDDGGGGGGSGEKRSLSSTFLAASSRGELWRVVDRDIMDGDDVDAVVRELARVAEECMGARGEERPAMKEVAERLQVLRRVEMMEAAAGVEVVDGFNGGGLVGRHGHLDTTTTTTTSYYQSMETDKLQLDVDDLVR

SEQ ID NO: 63 - DNA, 2262 bp, Oryza sativa
atgtcgctgcccggctgccccgacaagtgcggcgacgtctccatcccctacccgttcggcatcggcgaccgctgcgccgccgccggcctgagccgcttcttcaacctcacctgcgacggctcgcggtcgccgccggtgcccatgctgggtgaccccggcgcccaggcggacgtcatcgacttctcgccggagcgcggcgagctgcggctctacgccggcctcagctacgcctgctacgcgtcgtcggccacctccccgtccaccaacgccacgttcgccttctccctcgtgggcaccccgttccgcgtctcgccgtcgcgcaaccggctcacggtggtcgggtgcagcgcgctgggcctggtggtcggcaccgccagcggcggcggcggcgacgacgacgacctgtacgccacgggctgcttcacctactgcgccgagctgaacgccgcgggcgccgacggcgcgccgtgcgccggggcggggtgctgccaggtgcccatctcgccggacatcccctacctcggcgcggcgttccgcaccggcaactggacgaacaccgcgtggcggttcaacccgtgcttctacgccatggtcgccgaggacgggtggtacagcttccggcggcgcgacctcgtcggcgtcctcgcgtactacaacgagaccgtggacgccggccgtggcgtccccgtcgtcatcgactgggccgtcagggacgggtggtgcccggcgacggcggaggagagggcgcggcggaagtacgcgtgcgtgagcggtaacagctactgcgtcaactcgagcaacggcatggggtacacctgcaactgctcccgaggctacgagggcaacccctatctagccggcggttgccaagacataaacgagtgcgttctacgggagcaagaccccaagtacgaggagatgtacccgtgcaggcatggcatctgcattaacacaccaggcctgagtgcctgtgctatactggcaatggctctgtcatgcttgctagtcattcaacttcagagaaggaaacacatacaggagaaacagcaatacttcaagcaaaatggaggcctcaggctgttcgacgaaatggtgtcgaggcaggtcgacacggtgcgcgtcctcaccgaagacgagctcaagaaagccaccaacaacttcagcgacgatcaggtcatcggttgcggcggccacggcacggtgtaccggggcacgctcgacgatctccgggaggtcgccatcaagaggtccaaggcggcggtcgacggccgcggcggcggcggctgcgaggatgagttcgtcaacgagatcatcgtgctctcgcagatcaaccaccgccacgtcgtgcggctgctcggctgctgcctggaggtgcacgtcccgatgctggtgtacgagttcgtccccaatggcaccctgttcgacctcctccaaggcgggacggcggcgcggcgccggccggtgtcgctgggcctccggctgaagatcgcggcgcagtccgcggaggcgctggcgtacctgcactcgtcggcgtcgcgcgcgatcctccacggcgacgtcaagtcccttaacatcctgctcgacggtgcgctcgacgccaaggtcgccgacttcggcgcgtcggtgctgaggtccgccatgggcgagggcgagtcgttcatcgagtacgttcagggcaccctgggctacctcgacccggagagcttcgtcagccgccacctcaccgacaagagcgacgtgtacagcttcggcgtcgtcctcgcggagctcgccacccggaggaaggcggtgtacgacgacgacgacgcctcctgctccggccacgggggccagaagcggtctctgtccaccgcgttcctcgccgcgctcaggcacggcgagctctggagcgtgctggaccgcgagctcgtgaggcgccccgatgacgacggcgacggcgacgacaaggcggcggtggacgtggtccgtgagctcgcggagctcgcggcgcggtgcctgggcccgagcggggacgagaggccggcgatgaaggaggtggcggagcggctgcaggtgctgaggcggcgagccgagatgcgggcggtggccggagctggaagggacagcaacggtggcgaggtggatcgcagctggatcatgtgtggaggaggaggaggagcagtggggcgcggccatttggacacgaacacgacggcttcttaccagagcacggagactgacaagatgccgctgacgctgagtgtgaacgaccttgcacgctga

SEQ ID NO: 64 - protein, 753 aa, Oryza sativa
MSLPGCPDKCGDVSIPYPFGIGDRCAAAGLSRFFNLTCDGSRSPPVPMLGDPGAQADVIDFSPERGELRLYAGLSYACYASSATSPSTNATFAFSLVGTPFRVSPSRNRLTVVGCSALGLVVGTASGGGGDDDDLYATGCFTYCAELNAAGADGAPCAGAGCCQVPISPDIPYLGAAFRTGNWTNTAWRFNPCFYAMVAEDGWYSFRRRDLVGVLAYYNETVDAGRGVPVVIDWAVRDGWCPATAEERARRKYACVSGNSYCVNSSNGMGYTCNCSRGYEGNPYLAGGCQDINECVLREQDPKYEEMYPCRHGICINTPGLSACAILAMALSCLLVIQLQRRKHIQEKQQYFKQNGGLRLFDEMVSRQVDTVRVLTEDELKKATNNFSDDQVIGCGGHGTVYRGTLDDLREVAIKRSKAAVDGRGGGGCEDEFVNEIIVLSQINHRHVVRLLGCCLEVHVPMLVYEFVPNGTLFDLLQGGTAARRRPVSLGLRLKIAAQSAEALAYLHSSASRAILHGDVKSLNILLDGALDAKVADFGASVLRSAMGEGESFIEYVQGTLGYLDPESFVSRHLTDKSDVYSFGVVLAELATRRKAVYDDDDASCSGHGGQKRSLSTAFLAALRHGELWSVLDRELVRRPDDDGDGDDKAAVDVVRELAELAARCLGPSGDERPAMKEVAERLQVLRRRAEMRAVAGAGRDSNGGEVDRSWIMCGGGGGAVGRGHLDTNTTASYQSTETDKMPLTLSVNDLAR

SEQ ID NO: 65 - DNA, 3524 bp, Oryza sativa
cctgtgacggtgtgtacctatctcgctcgtcgccgtcgttggggtcgcgagaccgcggcggcggcgggcggcgaggggccgccggcgccgaggcatccgcgaccgcgaggcgggggatggcgcgcggcgacgacggcgagcggctgcctgtcgctgttggcgtgcttccatggcagcagcagcagcaacaacaacctacggtttctgtttctcccccaaattccaagaagtcaaacataactttagttgtacatgatgatgtgtttcgttctggtggactacaatatgttcaaccaaaaagaaaggaaatttgtctccaccacaagtcttacatgtcgtcaagagagtggcgaagagtcttaaaagcatcccaagatcatctgcaaattcccccatggctagcttggttgacccggcaaggttgcagaaattgttttcttttccttcttttaatgaatgggagaacttctgctctggtcgatattggttatccacatttccattcctctcagaggatgtatactatataatattgggtaccttcttgtttcccatcttatgggttcaacaaaagaaactataatagctagcatgcagctggttttgctatcgatcatagcatccactgtcatgttggtggcatctggagcacctcctcccactgctgctagtcttgctccctgccccaaaacatgtggagaagtgaacatctggtatccttatggtatcgggcctggttgctttcggcagggctttgagcttacttgcgacaccaccagcaaacctttgaagctcttcttgggaaacactatgactcaggtgattagcctctatccttcaggaactgtccttgcctctatcatgtacactatccccatgattcatggagttgacacctacaacttgtcatgggactctcctgggaggaatctcaacgttgagacctacaattacttggcgttcctcggttgtgggatcggggtttacctgttccatccagatactggtaaccttgtgggtcattgcacgatcaagtgtgcctccatggaggaaatgcacatggcaaccgaaggagggatttgcaatggcatgggttgctgcactgtcacattcccggtgttatttcgaggttttagagtgaccattgttaagagtaacgagacaataccgcagcccttcaacaatatcaccatcaaggctttcttaaccttccgtccttacatttttagcattgcggatctcctgtccaataagataaatgcaagcaccattggtgcttccatggcatacctctcgactgtcatcgcagatgaaccaaattgtccaacagctcggttggataataagacacaatttgcctgtggcagtaacaattgcatagatgtggcaaatggaggttattcttgtgcttgcccaggaaattctgatgatggcaatccctaccttcttgatgattgcaaacaagagtttaaccctaccccgaaaaagaattgttctagatcatgtggtagcacaaatattcctttcccgtttgggcttgagccaggctgttttgctaagaggagatttcaactgagttgtgcatcaaatcgcactcttattggaagaccacctgcaaaatatgaagtgacaaatatatcattagatgaaggactcctttatgttaacaagctttcagaatttgaagatgccaacacaaagtatttatcagtatactatggtggttctggatattttggccaacaattaatttatggtttggaaaagtctgatttatctgaagagtatggtgtttggaagtggtctgtgaccaatttgacgtgtgaagatgcaaaaagcaaaagtgcatatgcatgtgttagcacaaacagcgagtgtcttgatgttacacatgggaagctatatattggttatcgttgcaagtgctctcttggatttgaaggaaatccttatgtccaaaatggatgtacagatattgatgaatgctctataccaaactattgtaatgggacatgttataactttaaaggaagctatagttgttgtcctcatggtatgtcttatgatcgagtaagaaggcagtgcacttccaataagaggcaaaatattgttttgggacttgccattgggattagcagtggttttggagttctagctcttacattaattgcagctatattattcaaaaggtggaagagaagcactcggaagaaaattcgaagggcatacttccgaaaaaacaaaggccttctcttggagcagctgatctcatccagtaacaatgttactcctaacacaagaatattttctttggaagatttagagaaagcaaccaacaactttgacccaacacgtatccttggatatggaggccatggtactgtttacaaggggattttatccgatcaacgagtggttgccataaagaggtccaaaattgtggagcagagtgagattgaccaatttgttaatgaggttgccatcctttcccagattattcatcgtaatgtggtgaaactttttggttgttgccttgaatctgaggtgcctcttctagtgtatgaattcatttctaatggcacacttcatggtcttcttcatggtgatctgagcaccaattgtttgttgacatgggatgatcgaatgaggattgctctagaggctgcaggggcacttgcttatctccattcctctgctgcaatgccaatcttccatagagatgtgaaatcaactaatatactcttggatggtaccttcactactaaggtttcagatttcggtgcttctaggtccatttccattgatcaaactcgcgtagttacaatagtacaggggacatttgggtacttagatccagaatatttctatacaagccaattaaccgagaagagtgatgtttatagtttcggtgtgatacttgttgaactcctaacaaggaagaagccaatttttctcaactgtcttggtgaacagaaaaatttgtgccactgttttcttcaaagcctaagagataaaacaacaatggatatactggattctcaagttgtagaggaagctagccatagagagattgatgaaatggcctcagttgcagagatgtgcttaaagactaaaggagcaaagagacctaaaatgaaagaagtggagataagactgcaactcctaagagctgcaagatcaagggcatacaaggaagacttacaaaggagcagcgaaataaagccgttattaactccgaagtacaaatgtacttccctgaacagcaccaagaatgttgaaatgggccttgttgctaatccagaatctcaggttgtctctaggtgctataccatggagagagagatgatgtactcttcacagtttcctcgctgattgtatttgtttcgacccttgtaatgatttatttatttttcgcttatttttgtagactgtacaaaatgaatggcacagaccaatcgatttctctgtatgcagcagctctatctatttttgtggagtggttagttgcaacagctctatcaacg

SEQ ID NO: 66 - protein, 971 aa, Oryza sativa
MGELLLWSILVIHISIPLRGCILYNIGYLLVSHLMGSTKETIIASMQLVLLSIIASTVMLVASGAPPPTAASLAPCPKTCGEVNIWYPYGIGPGCFRQGFELTCDTTSKPLKLFLGNTMTQVISLYPSGTVLASIMYTIPMIHGVDTYNLSWDSPGRNLNVETYNYLAFLGCGIGVYLFHPDTGNLVGHCTIKCASMEEMHMATEGGICNGMGCCTVTFPVLFRGFRVTIVKSNETIPQPFNNITIKAFLTFRPYIFSIADLLSNKINASTIGASMAYLSTVIADEPNCPTARLDNKTQFACGSNNCIDVANGGYSCACPGNSDDGNPYLLDDCKQEFNPTPKKNCSRSCGSTNIPFPFGLEPGCFAKRRFQLSCASNRTLIGRPPAKYEVTNISLDEGLLYVNKLSEFEDANTKYLSVYYGGSGYFGQQLIYGLEKSDLSEEYGVWKWSVTNLTCEDAKSKSAYACVSTNSECLDVTHGKLYIGYRCKCSLGFEGNPYVQNGCTDIDECSIPNYCNGTCYNFKGSYSCCPHGMSYDRVRRQCTSNKRQNIVLGLAIGISSGFGVLALTLIAAILFKRWKRSTRKKIRRAYFRKNKGLLLEQLISSSNNVTPNTRIFSLEDLEKATNNFDPTRILGYGGHGTVYKGILSDQRVVAIKRSKIVEQSEIDQFVNEVAILSQIIHRNVVKLFGCCLESEVPLLVYEFISNGTLHGLLHGDLSTNCLLTWDDRMRIALEAAGALAYLHSSAAMPIFHRDVKSTNILLDGTFTTKVSDFGASRSISIDQTRVVTIVQGTFGYLDPEYFYTSQLTEKSDVYSFGVILVELLTRKKPIFLNCLGEQKNLCHCFLQSLRDKTTMDILDSQVVEEASHREIDEMASVAEMCLKTKGAKRPKMKEVEIRLQLLRAARSRAYKEDLQRSSEIKPLLTPKYKCTSLNSTKNVEMGLVANPESQVVSRCYTMEREMMYSSQFPR

SEQ ID NO: 67 - DNA, 2215 bp, Oryza sativa
gaagatctcgacagtcagattgcttttaggggaatatgcaaaaaggattgctcgacagtctcagaccaccatgggacctgtgctgctgtgcctagccatcgccgccgccaccgccgtgtgcgcagcatcatcaggagcaccaccatctcccgatgcggcggccgtcgccgttggtagctgccccacgtactccggatcaggttactcttctgcatctgacggcggcaaccaagaagagtatgatcccaataaagaaaatccgtgtaaacggtcatgtggctctatgtccattcctttcccattcgctcttctatccgcatgctctggcagtaaaagatttctcctaaactgtacatcaaataaaacacttatcggaattccgccagcgcaatatcaggtgataaatatatcattagacgatggtgtcctatttgtgaacaagccctcaaaccttggagatatcatcacaacgccaacggtggcaaacgagttacatgacttcgacttctctgggagccaaggcatttggagatgggctgtcgccaatcaaacatgtcacacagcgagaactgatcagctatcgtacgcttgcgtgagcaacaacagtttgtgtgttcatagatctactggctaccattgcaagtgctctttgggctacggaggaaatgcctatatcgaagatggctgtgaggatattgatgagtgtagtctacccaacttttgtaatggaaattgccagaacttcctagggagctacaggtgctcacattgccctcgtggttcaatttttgatcctgctaaacgtgtatgcatatatggacatggccttcatccagctggtcttctaattggacttagctgtggtattggagtcctttttcttgtagtaggtctaattttatttgttcgaaggtggaggagacatatgcaaagaaaaattagaagggaatacttccaaaaaaacaaaggcctcctacttgaacaattgatgtcgtctgatgaaaatgtagcacatgatccaaaaatattttccttggaagagctagagaaggcaacagacaactttcattcaacacgtattcttggctgtggaggccatggcactgtatacaagggaattttgttagatcaacgcgtggttgctattaagaaatccagaattgtggagcagaacgaaattgatcaatttatcaatgaggttgccatcttgtctcaaattgttcatcggaatgtggtaaaactttttggttgttgccttgtatcaaaggtacctttacttgtgtatgagttcatctccaatggtacattatatgatcttcttcatggtgaacagagtacaacattctcattaacgtgggaagattctatcagaatttcacttgaggttgcaagtgctctttcttacctccactctgctgcatcaatacccatattccatagagatgtgaaatcagccaatatactcttaaacgacaattacacttcgaaggtttcagactttggcgcgtcaagatccatctccattgacgaaactcgtgtggtgacaattgtacaagggacatttgggtatttggatcctgaatacttccatacatgccaactaactgagaaaagtgatgtttacagctttggtgttatacttgttgagatcctaacaaggaagaagcctatcatagtaaattgtttcggtgaaaaccaaaacctaggtcattgctttcttcaaacactacaacatggaacaatcatggaaatagtggatccccaaattgctaaggaagcaaatgaaagtgaaataaacgaaatggcatcgcttgcagaaatatgtttacgaatcagaggagaagaaaggcctaaaatgaaagaggtggagttaaggctgcagctcctaagagctatgataactgagagaagccgtcaggagttactaaggaacaatggaattgggccatcagtacaatccaattccagcactacatctgtgaccaggagtgttgtgcttcgtgcaggtattggcatatccactgatcaggatgcaactcgttgctataccatggagcaagagctcgtttcttggacagatctaccgcgctaaactgtactactctatcttttatgagacatcacaaactattctctgccgtctttttctggactgtttccttttagcgtgtgaaaaaaaaacagattaactttttgaatgtttgttggtttagtg

SEQ ID NO: 68 - protein, 673 aa, Oryza sativa
MGPVLLCLAIAAATAVCAASSGAPPSPDAAAVAVGSCPTYSGSGYSSASDGGNQEEYDPNKENPCKRSCGSMSIPFPFALLSACSGSKRFLLNCTSNKTLIGIPPAQYQVINISLDDGVLFVNKPSNLGDIITTPTVANELHDFDFSGSQGIWRWAVANQTCHTARTDQLSYACVSNNSLCVHRSTGYHCKCSLGYGGNAYIEDGCEDIDECSLPNFCNGNCQNFLGSYRCSHCPRGSIFDPAKRVCIYGHGLHPAGLLIGLSCGIGVLFLVVGLILFVRRWRRHMQRKIRREYFQKNKGLLLEQLMSSDENVAHDPKIFSLEELEKATDNFHSTRILGCGGHGTVYKGILLDQRVVAIKKSRIVEQNEIDQFINEVAILSQIVHRNVVKLFGCCLVSKVPLLVYEFISNGTLYDLLHGEQSTTFSLTWEDSIRISLEVASALSYLHSAASIPIFHRDVKSANILLNDNYTSKVSDFGASRSISIDETRVVTIVQGTFGYLDPEYFHTCQLTEKSDVYSFGVILVEILTRKKPIIVNCFGENQNLGHCFLQTLQHGTIMEIVDPQIAKEANESEINEMASLAEICLRIRGEERPKMKEVELRLQLLRAMITERSRQELLRNNGIGPSVQSNSSTTSVTRSVVLRAGIGISTDQDATRCYTMEQELVSWTDLPR

SEQ ID NO: 69 - DNA, 1606 bp, Oryza sativa
aagctggtagtttaagctggccatacatgcatccatcatccatggctgggatatcgcagctcctcctgcgcgagtccaccatcaccatcaccatcaccaccaccactaatattcccggtgccggcgtcgaattgcccagacaagtgcggcaacgtatccatcccctacccgttcggcatcggcagaggctgctacctcgacctgccgggctccggcagcttcagcatcacctgcaaccacaagacggaccctccccaaccctacaccgccgatgccctcttggtcctgaacataacgctggagacagcggaaatgttcgtcgtctcggctggcgccctcgccgtggtcaagtacccatcagtaagagcaagaagtgccatcacgagcaaatttatcactactactcaacaagaagaagaacattctatgcaagtaaaagtaactgtaggaatgcctgtcacccaacaagtaaacatgacattcttaccaagcggatacaccttgagcgcaccgtaccggctttccccgacgggcaacatgttcacggccgtggggtgcgtcaccatggcgaagttgtacggcagcgtagagaacagcagcagccagcagcagcacgggggcgacgacgacgacagcagcagcagcaggagggcaaatgataggggagagggcgtatgcgtacgacgcgggctgcatcacctactgcccgagcctgagcgacgccgcggcggatggggcgccgtgcaaggacctcggctgctgcgagtcgcccatcacgccaggcctcacccagttcgccgtaggatgggggcgatggccaggtgcatccgacgacgactacggcgagttggaccccgaacagtactaccagtatgcctttgtggcccaggactggtatacgttcaaacaagatcatcttactcactgggacatagacaacatcagtgttcctttcgttcttcactgggatatcaaggatggacctgcatgccgaccagagacaaattatgatagtcccttcggcgcatgtcatagcaaccacagcaaatgcgccaatgtcaccagtggtttggatggctatttttgcaactgctccgagggatacattggcaatccgtacataccagatggatgcaaagatgttaatgagtgtgaaaacaattctatttgtggtgctgggtccacatgcaagaatacagaaggtagctatcgttgtgactgcaatttcggccaaagacgtgacaatagttctgataacatgggtaattgtgaacccatattttccagagctgccatagcagtcataggtgaggttcaatacatgaatgcaatgttgattgaaatttgcagcatgccatacattccacatataatatataatgctctaattacatgcagttctgcattccatgtatacaccatatttgcattgcactacattcaacttgaagctcaacattgaagtgtgaaaacataattatttccagatagaccatggctgtgcctaaatgttatcttttcgcatgagcatagaccatgtggttgtgcctaaattatcttttcacgtgagcaatatatatggactacgcaattgcatgaatatgta

SEQ ID NO: 70 - protein, 268 aa, Oryza sativa
MIGERAYAYDAGCITYCPSLSDAAADGAPCKDLGCCESPITPGLTQFAVGWGRWPGASDDDYGELDPEQYYQYAFVAQDWYTFKQDHLTHWDIDNISVPFVLHWDIKDGPACRPETNYDSPFGACHSNHSKCANVTSGLDGYFCNCSEGYIGNPYIPDGCKDVNECENNSICGAGSTCKNTEGSYRCDCNFGQRRDNSSDNMGNCEPIFSRAAIAVIGEVQYMNAMLIEICSMPYIPHIIYNALITCSSAFHVYTIFALHYIQLEAQH

SEQ ID NO: 71 - DNA, 3221 bp, Oryza sativa
aaagcaaaaccttcatgctcatcgatattactcttatcgccaaacagtcccacaaatcaagcatcacattaaatttcgtagcactgaagagtgaaaacttcaggttgccaaagaagctgcagtaatctgaccatcgactatccctttggaattggatcatcccattgctctaggcagcccgatttcgagctcatctgcaacaataccacacaaccaccaaggctgttattcaagaatggcaccactgagatcattgactctcccagtactgaatatttggacgttatgttttcccattccatctccatgaaatccaatgtcagtgtgtacaacatgtcatgggatgctcctgggaaatctttcacccttggatatgctagactaaacatcaccggctgtgatttcgatatataccaggtgctcgatcaaagtggaaatgttcctgccaagctttgcaacgttacatgcccaaacaggggaatcacagaggacattgctaggcaggactgcaatggcaccggatgctgctccatcgatgttccaattcgtgctcagaccttacagcttatgtttgtccgccatggcaaaggggcggtcgaacttgacgcacaatccaaccaaagctccctgtggagcacaatcaatgtaacaacagtttacgctgtcattttgtggagaatcctggaccaaccgacgtgtgccagcaccttcgataacaggaccaactatgcctgtattagtgagcacagcaaatgcatggatggctatttcgcaccgattcttggttacaattgcttatgtgatggtgggtaccaaggaaatccatatatactagatggctgctcacgtgatagaggatataatccattccaacagaaggatgtctgcgacagaaagtgcgggagcattgatgtcccatatccatttggcctagaagaagggtgcgctgcaaggaaatcatttcagctaaactgcacaaacatgttatcgtccagcctccaactgaacgatgaataccatgtaacgtatataaatgtcagcaatgggctcatgggcgtagaagacaccacagattacaaacagtacatgtatgggatgcgtgtgacgcaggagcctcaactctatatcggatctggggaatcagcctcagtgcaatgggctgttgctaatctaacctgcctagaggcacagcaaaatatatctggatatgcttgtgttagcatcaatagcacatgcttgggtgtcaactcaacagatgattacattgggtatcggtgtagttgcacacttggcttccaaggaaatccatatatccaagatggttgccaaggttataatctctgcccttctccctctcccttccgatctcgctctttctctgatcttactaagtgatgttgcagatattaatgaatgtttggtgccaaacaaatgtaaaggagtatgctacaatactcctggaagttaccgttgcactgcttgccctgataaaacacagtatgatatgacaacaatgcagtgcacccggacaagaagacaaagtcttatgttaggtgttgtcattggacttagctgtggcttcagcatcctacttctcagcttaggaataatgcttctcattcatagatggaaaaaagacatacaaaagcaactacgaaggaagcatttccaaaagaaccaaggacttctgctggaacaactaatatcttcggatgaaaatgcaagtgagaacacaaagatattctctttagatgagctagagaaggcaacaaacaactttgatcctacacgtattcttggtcatggagggcatggcatggtgtacaaaggcattctatctgaccaacgtgtggttgcaataaaaaggtctaagcacattgaggaaggagagatcagtcaattcattaatgaggtagcaattctgtctcaaataaatcatcgaaatatagtgaaattatttggatgttgtcttgaaaccgaggtcccattattggtatatgactttattcccaatggttcattatttggtattctccattctggttcaaacaatggtttctccttgtcatgggatgactgcctaagaattgcagtggaagctgcaggagctctctattatctccattcggcagcttcagtatcagtgttccatcgtgatgtgaaatcctctaatatacttctagatgcaaactacaccgctaaagtatcagactttggtgcttcgagattggttcccattgaccaaactcatgttgtcacaaatgtacaaggcacatttggttacttagatccagagtattatcataccgggcagctgaatgagaagagtgatgtatatagttttggtgtggtacttgtggaactactactcagaaaagagcctatttttacaagggtgtcaggatcaaagcagaatttgtccaattactttctctgggaactgaaggtgaagccaatcacggagattgttgctgctcaagttcgtgaggaagctactgacgaagagatagagagtgtcgcttctcttgcacagatgtgcttgaggctccgaagtgaagatagacctactatgaagcaagttgaaatgaatttacagttcttgcgaacaaaaaggttgaactcatgccctgatgctctagacaaagctgaagagatgcagcctttgctatgtacaagatctgaagctagttgtgcatcattggcgattaacttgggtgacagttataaccctgagtctcaaagtagccacaaatgctatagcttggagcaagagtttagttcatcagttgggttgccacggtaagttgctcagagccatgctataatatgaaattcaattgagctgtggaggaaaatgattggatgttttcagatctagacaggtctgaaatgtatcaactcctcaatgtggtctaccattttattaattattatcccaaataatgtacaattccttttatatctcttaggtaccaagtatcatgtatgctagagcacttgtttataaacaacaggattagtctgatgcgctattatgctgatactgtgattgctcataacatgcgtacacttctttgttatgagaagcacatacttccaatgtgggtgtttcaaaagtttagtcccatgtataaaatatatgatgaatatatctaggtgagaaatggttggaaaatactacaaggaaatgctatatattttcaacattgctcaaccagttc

SEQ ID NO: 72 - protein, 624 aa, Oryza sativa
MAAHVIEKDVCDRKCGSIDVPYPFGLEEGCAARKSFQLNCTNMLSSSLQLNDEYHVTYINVSNGLMGVEDTTDYKQYMYGMRVTQEPQLYIGSGESASVQWAVANLTCLEAQQNISGYACVSINSTCLGVNSTDDYIGYRCSCTLGFQGNPYIQDGCQDINECLVPNKCKGVCYNTPGSYRCTACPDKTQYDMTTMQCTRTRRQSLMLGVVIGLSCGFSILLLSLGIMLLIHRWKKDIQKQLRRKHFQKNQGLLLEQLISSDENASENTKIFSLDELEKATNNFDPTRILGHGGHGMVYKGILSDQRVVAIKRSKHIEEGEISQFINEVAILSQINHRNIVKLFGCCLETEVPLLVYDFIPNGSLFGILHSGSNNGFSLSWDDCLRIAVEAAGALYYLHSAASVSVFHRDVKSSNILLDANYTAKVSDFGASRLVPIDQTHVVTNVQGTFGYLDPEYYHTGQLNEKSDVYSFGVVLVELLLRKEPIFTRVSGSKQNLSNYFLWELKVKPITEIVAAQVREEATDEEIESVASLAQMCLRLRSEDRPTMKQVEMNLQFLRTKRLNSCPDALDKAEEMQPLLCTRSEASCASLAINLGDSYNPESQSSHKCYSLEQEFSSSVGLPR

SEQ ID NO: 73 - DNA, 2978 bp, Oryza sativa
aggatagtctgaccaccaacagaaaggaaaagaacatgaatctcctctgtgcaatagcaatactcccggtgattcttgtggccttactagatactataccgctggcaagtgcatcgtctctgatgaatcacagccagccatccatggcaacgctcgcgagctgccccaagagttgtgggcagatgagcatccactaccccttcggaatcggagcaggctgcttccgtcagcctgacttcaacctcatctgcgacaactccactcagcccccaaagctcctcttgcatgacggcgtaaccgagatcatcggggatacagattccagttttgacatggacgtgggctcaacggagtcaatcgatgtcaacatttcctccaccatccctatgctatctagcatctctcattacaactattcttggaatctcagttctttttctatcgaatatgttattctgaacattactgggtgcaacttcgacacatatatcattaaccccgacaccgatattcgcacaaggatctgcaggaacagttgccccaaggaagaaatcacagaagcagtggctcgacaaagctgtaatggtactggatgctgcacatatgatatttacggtgttgctaacttgcagctcagtttcgtccgtggggatgaaggtttacttggagggaactctagtcgaaactccttatggaacataatcaacataagaagctggtacgcctatgtcacgtggagcataatcgatcaaccgacatgtgctagtgcaaaggataaccgaacggattacgcatgtgtgagcgccaacagtacatgcatagacagcttcaattctatggaatatcttggctacctttgttattgcagcagtggtttcataggcaatccttacgtacttcatggatgcacacgtgacgaaggatattatccagttcaacaaaaggcaaactgctcccgacggtgtgggaatatcagtgttccatttccttttgggctagaggaaggctgcgctgcaagaaaactatttcaactcaattgcacaaatgtgacatcttctacactccaatttgaccgcggtcatgttgtgacagacatagattttgcagaaggggttgttggcatcaaacttgcctcatatttcgaagagcaggagttcagtatgtatagatcaggagaacctgacctatatgcaagttttggagaagcagtgatctctgtgcattgggctgctgctaatctaacatgtcaagaggcccagaagaaccactctcgatatgcatgtgtcagtgcaaacagcacatgtttaggtgtcgactctacttatgcttatgttggataccaagtgcaaatgcatggatggttttcatggaaatccatacgtcgttaatggttgtgaagatattgacgagtgcaagaaaacacctggcatctgcaaaggcatatgccacaatgacattgggagttaccattgcatggagtgcccagacaaaacagagtatgatgtgacagctatgcagtgtgtctcaagaaaaaaacaaaatcttctgataggtattgtaattggacttagtgttggattcaccgttctactctttgtattgggtgggatgcttcttcttcgtagatggaaaagggacattcaaagacaactacgaagaaattactttcgaaaaaatcaaggtcttctattagaacaactgatatcatctgacgaaaatgcgagcgacaagacaaaaattttctccttggaagagcttgaaaaggcgacaaataattttgaccccacacgtatcctcggacgtggagggcatggcatggtatacaaaggaatcttatctgatcaacgtgtggtagccataaaaaagtcaaagataattaagcaagatgaaattgataattttatcaatgaggttgccatcctctctcaaataaatcatcgtaatattgtaaggctttttggatgttgtcttgaaactgaggtcccactacttgtttatgactttattccaaatggttcattatttggaattctccatgctgatgcacgtagtagttttcggttatcttgggatgactgcttaagaattgccactgaggcagcaggagcactctgttatcttcattcagcagcttcagtatcagtctttcatcgtgatgtgaagtcagctaacatacttttagatgcaaactgcacagccaaagtttcagattttggtgcttcgagattggttcccattaatgaaacccatgttgttacaaatgtacaaggcacctttggctacttagatccagaatactaccacaccgggcaattgaatgagaaaagcgacgtctacagctttggagttgtacttattgagctactacttaggaaggaacctatttttacaagtgaaacaggtatgaagcaaaacttgtcgaactattttctttgggaaaaaaaggtgaagctaattagggatatagtggctgatcaagttcttgaggaagcaaccgaggaagaaattaacaatgttgcctctcttgcggaagattgcttgagtctacgacgggatgaaagacctactatgaagcaagttgagttggcactacagtttttgctaaacaaaaggttgaattcataccgcactgttgaagcaaacaaggaagagatggatccctttattatgacaaaagttcaacatagcactgagaattcaaatgttgaatttctgagcaataaagcaactatatcgtcctatcagcctggcttggagcacgagtttatgtcatctgccactataccacgctagaatttattcagtttccagttctgtgctaggccatgatgcctgttgtttctcttgacaatgtgagataatgtaccttcaatatactgcacgttttaatttgaagtacacttgtaataaggcaaaatactgtgtaaaaaattatttaattttataaagttattccggtggaatggacatgaatactc

SEQ ID NO: 74 - protein, 489 aa, Oryza sativa
MLMLDTKCKCMDGFHGNPYVVNGCEDIDECKKTPGICKGICHNDIGSYHCMECPDKTEYDVTAMQCVSRKKQNLLIGIVIGLSVGFTVLLFVLGGMLLLRRWKRDIQRQLRRNYFRKNQGLLLEQLISSDENASDKTKIFSLEELEKATNNFDPTRILGRGGHGMVYKGILSDQRVVAIKKSKIIKQDEIDNFINEVAILSQINHRNIVRLFGCCLETEVPLLVYDFIPNGSLFGILHADARSSFRLSWDDCLRIATEAAGALCYLHSAASVSVFHRDVKSANILLDANCTAKVSDFGASRLVPINETHVVTNVQGTFGYLDPEYYHTGQLNEKSDVYSFGVVLIELLLRKEPIFTSETGMKQNLSNYFLWEKKVKLIRDIVADQVLEEATEEEINNVASLAEDCLSLRRDERPTMKQVELALQFLLNKRLNSYRTVEANKEEMDPFIMTKVQHSTENSNVEFLSNKATISSYQPGLEHEFMSSATIPR

SEQ ID NO: 75 - DNA, 2662 bp, Oryza sativa
gaacatgaatctcctctgtgcaatagcaatactcccggtgattcttgtggccttactagatactataccgctggcaagtgcatcgtctctgatgaatcacagccagccatccatggcaacgctcgcgagctgccccaagagttgtgggcagatgagcatccactaccccttcggaatcggagcaggctgcttccggcagcctgacttcaacctcatctgcgacaactccactcagcccccaaagctcctcttgcatgatggcaccaccgaagtcgtcggagatgaagattcactacgccggaccaggtatcccgtcagaggtgtgaggatctggcgtagtgattccagtattggcatggacgtaggattatcggagtggatcgatatcaacatttctgccactatccctatggtacctggcgttgctgagtacaattattcatggaaccttagttctttcagtatctttgatgcttctctgaatattactggttgcgagttcgacacatatataatcaacaacaagagctatagtcccactacagcaatctgcaaaagtagctgccccaacaaagagatcactgaaacggtagctcgacaaagctgtaatggtactggatgctgcacaatttatgttggaatagatgttgctaacttgcatctccgtttcgtccgccatggcagagaaggttttcttggagtgaactctagtcgaagctccttatggaatagaattaacatagttagcagttatgccagcgttatgtgggggataaacaatcgaccgacgtgcgctagcgtaaaggatcagaaccaaacggattatgcatgtgcgagcgccaacagtcaatgcgtggacagcatctcatctaccgatcttggctaccgctgtgaatgcaacagtggttatatcggcaatccttatgtacttgatggctgcacacgtgacgaagtactaaatgtgtcaagcgctagtggtgaggtttatgaactttgttcgctgaaagcaggctatcacccagttcaacaaaaggcaaactgctcccgatggtgtgggaatatcagtgttccatttccttttggtctagaggaaggctgcactgcaagaaaattatttgaactcaattgcacaaatgtgacatcttctacgctccaatttaaccgcggtcatgttgtgacagacatagatctcgcagaaggggttgttggcatcaaacttattacctcatattacgtagagcaggtgtttaggatgtacatatcaggagaaccttacctatatgcaagtttcggagaagcagtgatctctgtgcattgggctgctgccaatctgacatgtcaagaggcccagaagaaccactctcgatatgcatgtgttagtgcaaacagcacatgtttaggtgtcaactctactgatggttatgttggatatcggtgcaaatgcatggatggttttcatggaaatccttatgatgctaatggttgtgaagatgttgacgagtgcaagaaaacaccaggcatcttcaaaggcatatgccacaataacattgggagttaccaatgcatggagtgcctagacaaaacagagtatgatgtgacagctatgcagtgtgtttcaagaaaaaaacaaaatcttctgataggtattgtaattggacttagtgttggattcaccattctactctttgtaatgagtgggatgcttcttcttcggagatggaaaagggacattcaaagacaattacgaagaaattactttcgaaaaaatcaaggtcttctattagaacaactaatatcatccgatgaaaatgcgagcgataagacaaaaattttctccttagaagagcttgaaaaggcgacaaataatttcgaccccacacgtatcctcggacgtggagggcatggcatggtatacaaaggaatcttatctgatcaacgtgtggttgccattaaaaagtcaaagataattaagcaagatgaaattgataattttatcaacgaggttgccatcctctctcaaataaatcatcgtaatatcgtaaggctctttggatgttgtcttgaaactgaggtcccactacttgtctatgacttcattccaaatggatcattatttggaactctccatgctgatgcaagcacctttggctatttagatccagaatactaccacaccgggcaattgaacaagaagagcgatgtctacagctttggagttgtacttattgagctactacttaggaaggaacctatttttacaagtgaaacaggtttgaagcaaaacttgtcaaactattttctttgggaaaaaaaggtgaagctgattagggacatagtggctgatcaagttcttgaggaagcaactgaggaagagattcacactgttgcctctcttgcggaagattgcttgagtctacgccgggatgaaatacctactatgaagcaagttgagtgggcactacagtttttgctaaacaaaaggttgaattcatactgtactgttcaagcaaacaaggaagagatggatccctttattatgacaaaagtccaacatagtactgagaattcaaatgttgaatttctgagcaataaagcaactatatcgtcttatcagcctggcttggagcacgagtttatgtcatctgccactataccacgctag

SEQ ID NO: 76 - protein, 885 aa, Oryza sativa
MNLLCAIAILPVILVALLDTIPLASASSLMNHSQPSMATLASCPKSCGQMSIHYPFGIGAGCFRQPDFNLICDNSTQPPKLLLHDGTTEVVGDEDSLRRTRYPVRGVRIWRSDSSIGMDVGLSEWIDINISATIPMVPGVAEYNYSWNLSSFSIFDASLNITGCEFDTYIINNKSYSPTTAICKSSCPNKEITETVARQSCNGTGCCTIYVGIDVANLHLRFVRHGREGFLGVNSSRSSLWNRINIVSSYASVMWGINNRPTCASVKDQNQTDYACASANSQCVDSISSTDLGYRCECNSGYIGNPYVLDGCTRDEVLNVSSASGEVYELCSLKAGYHPVQQKANCSRWCGNISVPFPFGLEEGCTARKLFELNCTNVTSSTLQFNRGHVVTDIDLAEGVVGIKLITSYYVEQVFRMYISGEPYLYASFGEAVISVHWAAANLTCQEAQKNHSRYACVSANSTCLGVNSTDGYVGYRCKCMDGFHGNPYDANGCEDVDECKKTPGIFKGICHNNIGSYQCMECLDKTEYDVTAMQCVSRKKQNLLIGIVIGLSVGFTILLFVMSGMLLLRRWKRDIQRQLRRNYFRKNQGLLLEQLISSDENASDKTKIFSLEELEKATNNFDPTRILGRGGHGMVYKGILSDQRVVAIKKSKIIKQDEIDNFINEVAILSQINHRNIVRLFGCCLETEVPLLVYDFIPNGSLFGTLHADASTFGYLDPEYYHTGQLNKKSDVYSFGVVLIELLLRKEPIFTSETGLKQNLSNYFLWEKKVKLIRDIVADQVLEEATEEEIHTVASLAEDCLSLRRDEIPTMKQVEWALQFLLNKRLNSYCTVQANKEEMDPFIMTKVQHSTENSNVEFLSNKATISSYQPGLEHEFMSSATIPR

SEQ ID NO: 77 - DNA, 2789 bp, Oryza sativa
atggatgaaaacccattgtactcatttgcaatgcttctccggttctcccacatattttcacagctcaagctctgaaacttctctagggcaacaatgctaagcactataaagatgatcgacatgagccccttcagttcagtggttcctctgctcctattcgtcttgttttctgcagtgaatccaactgtgagatcatccagcgtgccaggaaatcaaggtatcaacagcaccattcttccttctgcggccactctggaaggctgcccacggagctgcggcaacctgagcttcgactacccattcggcattggttctggctgcttcaggaacccagacttcaatctcacctgtgacaacaccgcacaaccacctaggctcttcctgcagggtgggacagaggttatcgaagatattgatgctattgtatacggtagcacctcaaactacctatttatgtatgtcaccgttgatttttcccatgcaatcccagtaagtccaggtaccaaagattataacatgtcctggaaagccccagggagatcttttactcttgataatgccttgctaaacattactggctgtgactttgatatatacctgcttgatcaagacagaaatagcgctgtgaggctctgtacagttacttgccccaacgaagaaatcacggaaaaggtggccaggcagaactgcaatggtacagggtgctgtaccatcgagttatttgaggctactctcagtgcattccagttcaaatttgtccaacacagcaaaggtgggctcgaggcacaaacaaacagaagctctttatgggacagaatcaacataacaactatctatgctagcctgtcgtggagtatcgtcgatcaaccaacatgcgccagcacaagggataataggaccaactatgcctgcgccagcagcaaaagcaagtgctgtgagagctatggattacctgatcttggttacctctgtggatgtgatagtggatattggggaaacccatacatacccaatggttgccagcgtgataacggatatattccagctcagcagaaggcaaactgctcccgatcgtgtgggaacatcagtgttccatttccttttgggttagaagaaggatgctttgcaaggaagctatttcagcttaactgcacaagtgcaacatcctctagcctccaatttgatgatgagcatcagatggttacattggttatagatgcaaatgtttgcctggctttcaaggaaatccatatgtgcaaaatggctgtcaagataattcatggccaattaaggggcatactgcatattacaggtatcattattgggcttagtgttggttttggcattctacttgtcagcttaagtgcaacatttatctgccgtagatggaaaagggacatccaaaagcaactacgtcggaagcatttccaaaagaaccaaggtcttctcctagaacaactaatattgtcggatcaaaatgcaactgacaagacaaagattttctctttagaggagctagagaaagcaacaaacaactttgattctacacgtatccttggtcgtggagggcatggtatggtgtacaaagaaaccgaggtcccgctgttggtatatgactttattcccaatgggtcattatttggtgttctgcattctggctcaagcagtgatttctctttgtcatgggatgactgtctaagaattgcagtggaagctgcaggagccctctgttatctccattcggcagcttcagtatcagtcttccatcgtgatgtcaagtcctctaatatactcctagatgtgaactacacagctaaagtatcagactttggtgcttcaagattggttccaattgaccagactcacgtagttacaaatgtacagggtacatttggctacttagatccagagtattaccatactgggcagctgaatgagaagagtgatgtatatagttttggtgtggtacttgtggaactactaatcagaagagaacctatttttacaacagtatcaggatcaaagcagaacttgtccaattacttcctttgggagctgaaggtaaagccaatcaaagagatagttgcagcctacgttcatgaggaagctactgaggatgagataaacagtgtcgcttctcttgcagagaagtgcttgatgctccgaagtgaagataggcctacaatgaagcaagttgaaatgactttacagttcttgcgaacaaaaaagttgaactcatgccatgctactccagaaaacgatgaagagctgcaacagttgctaccgagaaggtctgaagctagttgcgagcaagtggctgttaacttgggtaacagtgctaattctgagtctcgaaatagcctcaaatgctatagcttggagcaagagttcatttcatctgttgggctgccatgctaagtccctaagagccggtttataattactctgaaattcacaatgaaaggattgaattttttccaattcttaacaggccttaaacgtggacatctactactcaaggaatgcggtctaccatatttattaaataacatcccaagaaagtatccttatctcattttcccagagtatcattcacactaatgtacctatacagttataatgatattgcatttgattactacatgcatgtgcttccttttgggagagatgcatatctatcatatttgttacaaaagttttgtcccaatggaaaaattgagtgatgtatgtatctagctgagaaatggttggaaaatactagtaataaaagtactatataaattcaacgg

SEQ ID NO: 78 - protein, 774 aa, Oryza sativa
MLSTIKMIDMSPFSSVVPLLLFVLFSAVNPTVRSSSVPGNQGINSTILPSAATLEGCPRSCGNLSFDYPFGIGSGCFRNPDFNLTCDNTAQPPRLFLQGGTEVIEDIDAIVYGSTSNYLFMYVTVDFSHAIPVSPGTKDYNMSWKAPGRSFTLDNALLNITGCDFDIYLLDQDRNSAVRLCTVTCPNEEITEKVARQNCNGTGCCTIELFEATLSAFQFKFVQHSKGGLEAQTNRSSLWDRINITTIYASLSWSIVDQPTCASTRDNRTNYACASSKSKCCESYGLPDLGYLCGCDSGYWGNPYIPNGCQRDNGYIPAQQKANCSRSCGNISVPFPFGLEEGCFARKLFQLNCTSATSSSLQFDDEHQMVTLVIDANVCLAFKEIHMCKMAVKIIHGQLRGILHITGIIIGLSVGFGILLVSLSATFICRRWKRDIQKQLRRKHFQKNQGLLLEQLILSDQNATDKTKIFSLEELEKATNNFDSTRILGRGGHGMVYKETEVPLLVYDFIPNGSLFGVLHSGSSSDFSLSWDDCLRIAVEAAGALCYLHSAASVSVFHRDVKSSNILLDVNYTAKVSDFGASRLVPIDQTHVVTNVQGTFGYLDPEYYHTGQLNEKSDVYSFGVVLVELLIRREPIFTTVSGSKQNLSNYFLWELKVKPIKEIVAAYVHEEATEDEINSVASLAEKCLMLRSEDRPTMKQVEMTLQFLRTKKLNSCHATPENDEELQQLLPRRSEASCEQVAVNLGNSANSESRNSLKCYSLEQEFISSVGLPC

SEQ ID NO: 79 - DNA, 120 bp, Oryza sativa
atgatcagagagaagggtacagagagattgtataggaggaagaaggaaaggaaaaggcaaagcaacgttgaggaatttcatcgttttcgcaaattagggaatttgtcgcaaggtatctaa

SEQ ID NO: 80 - protein, 39 aa, Oryza sativa
MIREKGTERLYRRKKERKRQSNVEEFHRFRKLGNLSQGI

SEQ ID NO: 81 - DNA, 2741 bp, Oryza sativa
gttcgcattaaacaaacttgtttttttttttcttcacacggacttacccatcacccgttcgtccgccggaaaattcccctcgtctcttccatgttccatcaccgccaggcgctagcttttcacctgcaagatctcgaggtagagtggtagaccacagcccgccggattcttgcgagcagcttcccatcgccctgccttgatctgtgctggcctgcgtcccatccccgtgctgccgcgcgcgatccctcctggcctggggctggatttgtggatactttgtacaggtgttgagggttgcagttgcagatttgattatttccagatcgaggacggatggttgcggccaatgccaccgtcatggatagggttccttctgtgtgggatcggccattttgcatcaaggctagaggatgttgcacttgtgcagttaagctgaaatagcttccttgcaaagcatccttcttctaacccaaaaggaaatggaacactgatgttcccacacgatcgggagcagtttgccttctgctgagctggaatatatcctactttatatgataagatgtttgtaagtaagtttactcgaatagataaattcctagttctttcacttaattaaaatatggttattgttgatatgacaaagttatgcatatatatctgagtacagattttccaagcatgagtgttgctatacttaagatttggatttcactcctgtgcagtgagtacttcaccaatcatgttgtactacatgattggtgaagtacaaatcatatatgtacatcatgttgtactacatatatgtacaaattagaaaaaagatagtacaagttatttatattttttatgtatagcatatatgtactaattttgcacaagttttttgttagtacatgttttaacttgctctaaatatataaatgctgtcagcagtgttgtgtactggaggacatttcgaaataggtatagctacatccatgtttaactgaaacttttcgtttagttttaaagaatagaagtttattcatgcatatagtttttttttctcacacagctgcatatatatagtttccatagcggggtgaattaccgttatcacgctggcaaccattgggtatgtatgggtttccccaatatccactatcacatccacagaggtaaccaagatcaggtatatatcaaagtcacagccagtaatgtttagcaaggcattatcaagagtaaaagatctccctggggctttccaggacatgttataatctttggtacctggacttactgggattgcatgggaaaaatcaacggtgacatacataaataggaagagcctaggtggttgtgcggtgttgtcacaggtgagattgaagtctgggttcctgaagcagccagaaccaatgccgaatgggtagtcgaagctcaggttgccgcagctccgtgggcagccttccagagtggccgcagaaggaagaatggtgctgttgataccttgatttcctggcacgctggatgatctcacagttggattcactgcagaaaacaagacgaataggagcagaggaaccactgaactgaaggggctcatgtcgatcatctttatagtgcttagcattgttgccctagagaagtttcagagcttgagctgtgaaaatatgtgggagaaccggagaagcattgcaaatgagtacaatgggttttcatccatatctaggtcatggtcttgctgctttataagcatctggagtctggacagggccacaggggccactgggaaatgtaaaagtcagtgattgtcaatactgcaagaaaattgtcaaggtttactgcaagactacttacagcgatgagggttggtatcaggtatgtcacttcaatcagttccactattaattttacatgtgaaccaaaactttgctctctctttccacctggcttccattctttcaatcaccatcgttgactgactgggcaatatatggctctatattggaagcatcttctcacctttattcaacattaaagtagccaattgcagctagtaattgattcctggagtcctggtcagtcaacattctagctttctaagccattcaaaatgtccaaagcaaactcatgaatgtggcgagcacattttccaccatgccgttgatgctgacagcattgggaactgagtgccaaccagcgtaagtttctaacccatggagcggggagtcgaacagtttgatcgtgggagtctggatctggcttagtgttcaagtacatgattttgacaggatatagtgactgaagtgtgaaactgtctttcctggagattacccctgcattgctcatccagtggaggaaacagagttcactgcttgttacttgtgaagtcgatgaaggcagttgatggtagcagttcaccaaggtcaggcagagtgactgacccagcggctattcagcaatccgtgctaattaagtgattgtaataaagctctccatttcctggaaaagaagttacgaaagaaaggtgcaactgaaattggttaaggttcttcgaatccggtggaacacctgcctacttcaaccactggtttagaacctatgctaacgaactacattctgctgatttgattatgttctaagcttttcgtcgagatggcatcaattactttgcatccattcaacgcaagagtatgtacaaatatactgtcttgatgtccgttgctgttttgatgtgcctaaattaaccgacttactccctc

SEQ ID NO: 82 - protein, 68 aa, Oryza sativa
MSIIFIVLSIVALEKFQSLSCENMWENRRSIANEYNGFSSISRSWSCCFISIWSLDRATGATGKCKSQ

SEQ ID NO: 83 - DNA, 2326 bp, Oryza sativa
aggattatacctcaacctactaggaaagttcctattatatgcagaagatagatatatatactgacgagctagagcttcggagttaatttcaaggccacaggcgtaagctaactgggtgttataggctggacgacgatggctgccgtcgtcgttgatgtgctactggcatgtctagcgctgctcctaccagcttcgtcatgtgcagctggggcaccaacggtggcagctgcacagaccagcgctggcgccggaggtggctatggcgctggctgtgccaagagctgcggtgacctgaccttcgattaccctttcggcatcggcgccggctgcgcccggggccatgacttccagctcgtttgcaacaccaccacgcagcccccaacgctcttcctcagcgatggctttacccaagtcatcaacagcatcggggccgccggctatgtctatgtgaacttttcacttgacatccctatgagatctggtgtcgatctgtacaatgtgtcatggacggtacctggcgattctttctccgtacgtgacagtgcaagggtaaccatcggacatggcaactttgatgtatacttgctcgatgcctacagttcgaagaggataatcttgtgttcgcttacccagcctaccaatattgatgacaccagtgacgagggtgagtgccaacggaatattcccatcgtccgtggttttcaactccagtttgtccatcggcatgaacacggcgaaggccagcgaaccagtgtcgacagcgtcagaatcgagaacgacggcgtgcgacttgggtgggccattgtggatcattcgacgtgcgctgaagccaagcgtgacaagagcagctatgcctgtgccagcaagcacagccggtgcgatgataacttgagctttacagcttcccgtgctggttacttatgcaagtgcaccgatgggtatcaagggaacccgtatgcacccaatggctgccggcgtgatgtaggattgccggacgcaagatatgatcggtttccgagtaagaacaattgtagcccgtcatgtggaaatatcagcgttccatatccatttggcctagaaaaaggctgctctgcaaatcagcatttcctgctcagatgcacctactacaaagacaacaagagtacaaaccctgacctcttgtggtgggcaacaagatacaccgacgagccgtcaacaccgaccaagcttgttcgcatagatatcagcgaagggctcattatcttggccggtgagcactacgaggagttccttgccatggatggtacggctagtgctagagtctccgatggttcagcaaaggactttgtggttaagaatctgcattttgccatcacaaaccaaacctgcaaagaggcgcagcagaataccaccggatatgcatgtgtcagcgttaacagtacgtgtttggccgtcaacacaggtgatgggtatattggttataggtgcaagtgcaagcatggctttgaagggaatccgtctatcaaagatggttgccaaggtatcgtcattggacttagtgctggctttggaattctactgcctggcttaagcgcaaaaatgctcttccataaatggaagaaagcttcagtatcagtttttcatcgtgatgtgaagtcctctaatatactgttagatgcaaattacactaccaaagtttcagattttggtacgtcaagattggtttctatcgatcaaacccatattgtcacaaaggtgcaaggcccatttggttatttagatccagagtattgtcaaactgagtgtctaaacgaaaaaagcgatgtgtatagttttggtgtggtactattggagctacttctcatgaaagagccgatttttacaagtgagaatggcttaaagttgaatttggccggttattttcttgaggaggtgaaggtaaggccattaagtgagattgttaccactaagatatacgaagaagcaacagaggaagagattaacaatgttaccttgcttgcggagatgtgcttgagtccccgaggcgaagaaagacctaccatgaagcaagtagagatgacattacagtccttgcgcaatgttacacagacaacggctgttcaccgtgctaatgcatcggatcagctgagccaaagatgctatagcctagagcatgagttcattgcttcagctgagctaccacgctaaatgatttgattagactttccaataatgttcctcatttcacaatctatgtagtaatgcattatttctgggttatgtctgtagtaatgatctcgaactcgtttcttggaagtttagattcatgtgatcgtgacattatttc

SEQ ID NO: 84 - protein, 683 aa, Oryza sativa
MAAVVVDVLLACLALLLPASSCAAGAPTVAAAQTSAGAGGGYGAGCAKSCGDLTFDYPFGIGAGCARGHDFQLVCNTTTQPPTLFLSDGFTQVINSIGAAGYVYVNFSLDIPMRSGVDLYNVSWTVPGDSFSVRDSARVTIGHGNFDVYLLDAYSSKRIILCSLTQPTNIDDTSDEGECQRNIPIVRGFQLQFVHRHEHGEGQRTSVDSVRIENDGVRLGWAIVDHSTCAEAKRDKSSYACASKHSRCDDNLSFTASRAGYLCKCTDGYQGNPYAPNGCRRDVGLPDARYDRFPSKNNCSPSCGNISVPYPFGLEKGCSANQHFLLRCTYYKDNKSTNPDLLWWATRYTDEPSTPTKLVRIDISEGLIILAGEHYEEFLAMDGTASARVSDGSAKDFVVKNLHFAITNQTCKEAQQNTTGYACVSVNSTCLAVNTGDGYIGYRCKCKHGFEGNPSIKDGCQGIVIGLSAGFGILLPGLSAKMLFHKWKKASVSVFHRDVKSSNILLDANYTTKVSDFGTSRLVSIDQTHIVTKVQGPFGYLDPEYCQTECLNEKSDVYSFGVVLLELLLMKEPIFTSENGLKLNLAGYFLEEVKVRPLSEIVTTKIYEEATEEEINNVTLLAEMCLSPRGEERPTMKQVEMTLQSLRNVTQTTAVHRANASDQLSQRCYSLEHEFIASAELPR

SEQ ID NO: 85 - DNA, 2502 bp, Oryza sativa
tttctcatttcgcacaacagaataccagcaaagaatccaagattatccaggcatcgctcatgaaaccattcatccacagagcagctgctttgctatgtctcgccgtagcaactgcggtgtgtctctcctccgtcacagcgatgtcctgccagagaaaatgcggtgacatcgaagttccttttccattcggcatagacggtgatcagcctggctgtgccaagccgggctttgagctgagctgcggcaacaacacggagagtggtgtaccgattctcctccgcaaagtgcagccccttagcaggagcgtggaggtgctcggcatctccttgccgaaaggccagctccggatgaggatgcatatgtcctctcactgctacaacatgaccactcgtgtcatggactgcgtcgacaacgggtggatggacttgacggggagtcccttcaccttctccgacagcgcgaacaagttcacggcctttgggtgccaagttcttgcatatcttggggcgggcgaacagagggacataggaagcaacctaagaattggctgcgcggccagttgtggcaaggatgattctgccactatcggtggtggtagatgctctgggataggctgctgccagacggctatcccaaaggggataaagtattataaggcatggtttgatgaccgcttcaacacgtcttccatgtacacatggaaccgttgtgcctatgcagcgctcgtggaggagtccagcttcaatttctccatgatttacgattcatcatcgaagttcaacagcgataccgtctctagtcagccgccgtttgtggttgactgggttatgggaaatatatcatgcaaagaagctcgtaaaaatctaggtacctacccatgcatcagcaacaacagcatttgtttggactcacagaatggaccgggttacatttgcaactgcagaaaggggttccagggtaacccttacaataaaggtcttgacagctgccaagatattaatgagtgtgacgatcctaagaagtacccctgctatggtaaatgcattaacaaacttggaggatttgattgtttctgccctgcgggaatgagaggaaatgcatctgttggaccatgccggaaagatttcccactgggaattggtattgcaattggtttgggtgttggtttcggaattctcctacttagcttgtctgtggtgtttcttatccgtaaacagagaagcgacatccaaaggcaactacggaaaaaatattttcagaaaaacaaaggccttctactagaacaactaatatcttctgacgaaagagctagcgatcgacaaaaattttctccctagaagagcttaaagaggcaactaataactttgacccaacacgtgttctcggtagtggaggtcatggtatggtttacaaaggtatcttatctgatcaacgtgtggtggcgataaaaaaaccaaacatcatcagggaagaggagattagccagtttatcaatgaggttgtaattctctcacaaataaatcatcgccatattgtcaaactctttggatgctgtcttgaaactgaagtccctctattagtgtatgattttgtacctaatggttcactaaatcaaattattcatgctgataaaagtaacagacgtttctcattgtcctgggatgattgtttgcgaattgctacagaagcagcaggtgctttatattacctccactctgcagcatcggtatcagttctacatcgtgatgtgaaatcatctaatatactcttggattcaaactacaccgctaaagtttcagattttggagcttcaagattgattccgaatgaccaaacccatgttttcacaaatatacaagggacatttggatatttagatcctgagtactaccatactgggcatctcaatgagaaaagtgatgtgtatagttttggtgtagttcttttagagctgcttctaagaaagcaacctatttttgacgatggcactggcacaaagaaaaatctatcaatatattttctttctgagataaaaggaaagcctattacagagatagttgcccctgaagttattaaggaagcaatagaggatgagattaatatttttgcctcaattgcacaggcatgcttgaggctccgaggtgaagaaaggccaacaatgaagcaagtggagatatcattacagtctataagaaacaaagttttgagttcaggcagcgctagttccgaaagcaaccatgagatagaaacacccttatgtgaaagttacgttgatctgcatcaaactatgggtgttgatatcaatggcattgctaatttaatatcttcaaattgctatagcttagagcatgaatttatgttatccgctagctttggaaggtaaattgtgtttgtcccgttgttgaaatgtcgatagatgttcttatagtatctttgtgcatttgcacaatctataagcttgtcataaacaaaatgttgaatatacatttgtgatacatcatt

SEQ ID NO: 86 - protein, 425 aa, Oryza sativa
MKPFIHRAAALLCLAVATAVCLSSVTAMSCQRKCGDIEVPFPFGIDGDQPGCAKPGFELSCGNNTESGVPILLRKVQPLSRSVEVLGISLPKGQLRMRMHMSSHCYNMTTRVMDCVDNGWMDLTGSPFTFSDSANKFTAFGCQVLAYLGAGEQRDIGSNLRIGCAASCGKDDSATIGGGRCSGIGCCQTAIPKGIKYYKAWFDDRFNTSSMYTWNRCAYAALVEESSFNFSMIYDSSSKFNSDTVSSQPPFVVDWVMGNISCKEARKNLGTYPCISNNSICLDSQNGPGYICNCRKGFQGNPYNKGLDSCQDINECDDPKKYPCYGKCINKLGGFDCFCPAGMRGNASVGPCRKDFPLGIGIAIGLGVGFGILLLSLSVVFLIRKQRSDIQRQLRKKYFQKNKGLLLEQLISSDERASDRQKFSP

SEQ ID NO: 87 - DNA, 2464 bp, Oryza sativa
attttttccagcaacaaagatgattcaggcattgatcttccctactctactatgtctcaccatagcaacttcaggtggtcttgctgtagttgcagcatccacctgccagagaagttgtggtagcatagatatcccttttccattcggcatcaaaggtcaggctggctgcgccatgcctggttttgagctgatctgcaacagtaccggtaacagcatacccaagctgcttctccggaatgtggagctgctcaacatctcgttgccagaaggttaggctcgcatgaggatgcctatgtcatacgaatgctacaacatgacgaaacatgacatggactgcgtcgacaaggcaaatctgagcttgacgggaagtcctttcacattctctaacagtgccaacaagttcacggtctttggatgtcgaatgcttggttacctcggtcctggtgggcagagcgccgtaggcagtaacctaacaattggctgtgccaccagttgtggccagggtgatgatcttttaagcatcaatggtgaaggatgctctgggataggctgctgtcagacggccatccccaaagggatcaagcactacaaggtttggtttgacacacacttcaacacatcagtcatccacaattggtcccgttgcagttatggagcgttagtggaggaggccagcttcaaattctccacgatttatgccacgtcatcgaatttcagcaaccctttcggtggtgagcctccatttgtggtggactgggttgtagcaaacaatacctgcgccgaagcaagaaaacatttagattcatatgcatgtgctagcagcaacagcgtgtgtattgactcgagcaatggaccaggatacttctgcaaatgttctcaaggatttgaggggaatccttaccttcagggtcatgatggttgccaagatattaacgagtgtgaggattctaataagtacccttgctatgggaagtgcatcaacaaacttggaggattcgattgtttttgccctgcgggtactcgaggagatgcttctgttggaccatgccgaaaagagtttccactagcattcggtattgcaattggcctaggagttggtttcggaattcttcttcttgtcttaaccgtagcattccttgtccgtaaaagaaagaatgatatccaaaagcaattaaggaagaaatattttcgaaaaaatcaaggccttcttctagagcaacttatatcatctgatgaatgcgctactgatagcacaaaaattttcaccctagaagagctgaaagaggcaacaaataactttgatccagcacgtgttcttggtagtggagggcatggtatggtttacaagggcatattgtccgaccagcgtgtggtagctataaaaaaaccaaacatcattagggaagaagagattagtcagttcatcaacgaagttgcaatactatcgcagataaatcatcggaacattgtaaaactatttggatgttgtcttgaaaccgaagtccctctactggtgtatgactttgtcccaaatggctcactaaattgcattattcacgctgatccaagtatgagagaattcacattgtcctgggatcagtgcttgagaattgccaccgaagctgcgggagctttatattacctccactctgcagcatcagtatctgttttacatcgtgacgtgaaatcttcgaatatacttttggatgccaactacaccgctaaggtatcagattttggggtatcaagactgattcctaatgatcaaacccatgtttttacaaatatccaaggcacatttgggtacttagatcctgagtactaccataccgggcatctaaatgagaagagtgatgtctacagttttggtgttgttcttttagagctgcttctcaggaagcaacctatttttgacagtgaatctggttcaaagaaaaatttatctatttacttcctttctgagctaaaaggaaggccagttgcagagatagctgctcctgaagttcttgaagaagcaactgaggatgaaattaacattgtcgcctcaattgcccgggcatgcttgaggcttagaggtgaagaacggccaactatgaagcaagtagagatgtcattacaatctataagaaataaaggtttcagatcaggcacagtttctccagaagatagcgatgagctgcaaactccacaatcagaaggacatgtagattatcatcaagctacggggattggaatcaacagtatggctaatttagcatctccaggttgctatagcctgcaggaagaatttatgttatccggaagtcttccacggtaaactatgattgtcatgctgttaaattgttgcatgatgtatttttctaccttcaacatagcttgtcatttccccatctatcttattgtaaagaaaatacttgtgtacatattgtgttacatcattaacagtctggtacaccttctgctc

SEQ ID NO: 88 - protein, 678 aa, Oryza sativa
MRMPMSYECYNMTKHDMDCVDKANLSLTGSPFTFSNSANKFTVFGCRMLGYLGPGGQSAVGSNLTIGCATSCGQGDDLLSINGEGCSGIGCCQTAIPKGIKHYKVWFDTHFNTSVIHNWSRCSYGALVEEASFKFSTIYATSSNFSNPFGGEPPFVVDWVVANNTCAEARKHLDSYACASSNSVCIDSSNGPGYFCKCSQGFEGNPYLQGHDGCQDINECEDSNKYPCYGKCINKLGGFDCFCPAGTRGDASVGPCRKEFPLAFGIAIGLGVGFGILLLVLTVAFLVRKRKNDIQKQLRKKYFRKNQGLLLEQLISSDECATDSTKIFTLEELKEATNNFDPARVLGSGGHGMVYKGILSDQRVVAIKKPNIIREEEISQFINEVAILSQINHRNIVKLFGCCLETEVPLLVYDFVPNGSLNCIIHADPSMREFTLSWDQCLRIATEAAGALYYLHSAASVSVLHRDVKSSNILLDANYTAKVSDFGVSRLIPNDQTHVFTNIQGTFGYLDPEYYHTGHLNEKSDVYSFGVVLLELLLRKQPIFDSESGSKKNLSIYFLSELKGRPVAEIAAPEVLEEATEDEINIVASIARACLRLRGEERPTMKQVEMSLQSIRNKGFRSGTVSPEDSDELQTPQSEGHVDYHQATGIGINSMANLASPGCYSLQEEFMLSGSLPR

SEQ ID NO: 89 - DNA, 1974 bp, Oryza sativa
atggcggcatgtcttgccgctgttgcagcatcctgccagaggaagtgcggtgagatagacatccctttcccgttcggcatcgccggtcagcccggctgcgccatgaccggcttcaagctgagctgcaacgacaccgggaacggcgtgcccaccctgctcctgcggaacgtggaggtgctcggcatctcgctgccgttaggtcaggctcggatgaagatggatatgtcctacgactgctacaacacgacaaggaaggatatcgactgcgtcgatatggttgatctgaacttgaaagggagtcccttcactttctctgacactgctaacaagtttattgtctttgggtgccgtatgctcgcttatcttggcccaggtgaacaaaatgatgtaggtagcaacctaactatcggttgtgcggccacttgtggtataggcgatgatctcgtgagtatcaacagtgccgggtgctctgggataggttgttgccaaacgaacatccctaaggggatccggtattacaaggtttggttcgacggtcgtttcaacacaacggacatctacaactggactcgttgtgcttacgcagcacttgtcgagacatccagctttaatttctccacggtttacaattccctatcaaggttcaatgacaatcttggtagccagccaccttttgtggtggactgggctattggtaattccacatgtgagcaagctaaaacaaattcagattcctacatgtgcataagcagcaatagcgtctgtttgaactcgcgaaacggacccggttacatctgcaactgccaaaatggattcgaaggaaatccttacctgaacgattcgtttggttgccaaggtaaaacaaaaggagtccatatgaggtgcaagttgataaatcatcgtcatattgtaaaactctttggatgttgtcttgaaaccgaagtccctctattagtgtatgattttgtcccaaacggttcactaaatcaaattattcatggtgctacaagtaatagggaatcatcattgtcttgggatgattgtttgaggattgctacagaagctgcgggtgctttgtattaccttcattccgcagcatcagtatcagttttacaccgtgacgtgaaatcttctaatatacttttggatgcaaactacacggctaaagttgcagattttggtgcatcaagattgattcctaatgatcaaacccatgttttcaccaatatacaaggcactttcgggtatttagatccagagtactaccatactggacatctgaatgagaagagtgatgtgtatagctttggtgtagttcttttagaactgcttctcagaaggcaacccatttttgaatgtgagtctggcacaaagaaaaatctatctatttatttcctttatgagataaaaggaaggccaattactgagatagttgcccctgaagttcttgaggaagcgaccgaggatgagataaatacagttgcctctatcgcacaggcatgcttgaggctccgaggtgaagaaaggccaactatgaagcaagtggaaatgtcattacaatctgtaagaaataaaggtttcagttcagctggtaccagcccagaaagcaatcatgggatgcaaccagccctatccgaaacatatgtaaatctgcatcagcctcttggagttcatacaattggtataattaatttagcatcttcaaactgcaatagcttgcagcaagaatttatgttatccgctagtttcgcaagtccctatactttgtgtgccgggcctggcctgctggcccatcgtgccgggccagcccagcgcgccgttggggaggcccaggcatggcccggcggtcaggctgggctgacacaggcccgacccaagtcgggccgtgccgtgcttgcgccaggccaaaatgccgtgccgtgggccggaccttggggcctcgggccttatggccatctatactccatacattaa

SEQ ID NO: 90 - protein, 657 aa, Oryza sativa
MAACLAAVAASCQRKCGEIDIPFPFGIAGQPGCAMTGFKLSCNDTGNGVPTLLLRNVEVLGISLPLGQARMKMDMSYDCYNTTRKDIDCVDMVDLNLKGSPFTFSDTANKFIVFGCRMLAYLGPGEQNDVGSNLTIGCAATCGIGDDLVSINSAGCSGIGCCQTNIPKGIRYYKVWFDGRFNTTDIYNWTRCAYAALVETSSFNFSTVYNSLSRFNDNLGSQPPFVVDWAIGNSTCEQAKTNSDSYMCISSNSVCLNSRNGPGYICNCQNGFEGNPYLNDSFGCQGKTKGVHMRCKLINHRHIVKLFGCCLETEVPLLVYDFVPNGSLNQIIHGATSNRESSLSWDDCLRIATEAAGALYYLHSAASVSVLHRDVKSSNILLDANYTAKVADFGASRLIPNDQTHVFTNIQGTFGYLDPEYYHTGHLNEKSDVYSFGVVLLELLLRRQPIFECESGTKKNLSIYFLYEIKGRPITEIVAPEVLEEATEDEINTVASIAQACLRLRGEERPTMKQVEMSLQSVRNKGFSSAGTSPESNHGMQPALSETYVNLHQPLGVHTIGIINLASSNCNSLQQEFMLSASFASPYTLCAGPGLLAHRAGPAQRAVGEAQAWPGGQAGLTQARPKSGRAVLAPGQNAVPWAGPWGLGPYGHLYSIH

SEQ ID NO: 91 - DNA, 783 bp, Oryza sativa
atggggaacggcgatgaaggtgcggtcgaggacgtcagggccgcgacgaacagggccagcggttacttcttcttcagcgggagggagcactggacgccgggttggaggagcagcaacgacggtgatgcagcgtcgagggttgtggcggtggccaccaaccctcgtccggcgctcagtgtggcgatggtggggatggtgacgactcctcctcgaacgacggaggaggtggcgcagacggcgagcgcgttgatggcgagggaggccgagaacggcatccatgatcaaatgaaaggatataatccttttcagcagaaggcaaactgttcccggtcatgtgggaatatcacagttccctatccatttggtctcgaagaaggttgttttgccagaaaactattccatctcaactgcacagaagcaaactcttcaactctgcgattcgacaagtataatcaggtgactgacatcaaaattgaggaaggagttgtgctgattaaatatgacgctggtggtggtggtgatcaggagtttatggcgatagacggagaaccacatctatatgatggctcttgggattactctatctctgttggatgggctgttgccaatctaacatgcctggaagcaaaacagaatgcctctggatatgcatgcgttagtactaacagcacttgtgttccagtgaactctacttctggttatgttggctatcggtgcaactgcactgccggttttcatggaaatccttatatgctgaatggatgcataggtaaagaacattag

SEQ ID NO: 92 - protein, 260 aa, Oryza sativa
MGNGDEGAVEDVRAATNRASGYFFFSGREHWTPGWRSSNDGDAASRVVAVATNPRPALSVAMVGMVTTPPRTTEEVAQTASALMAREAENGIHDQMKGYNPFQQKANCSRSCGNITVPYPFGLEEGCFARKLFHLNCTEANSSTLRFDKYNQVTDIKIEEGVVLIKYDAGGGGDQEFMAIDGEPHLYDGSWDYSISVGWAVANLTCLEAKQNASGYACVSTNSTCVPVNSTSGYVGYRCNCTAGFHGNPYMLNGCIGKEH

SEQ ID NO: 93 - DNA, 1146 bp, Oryza sativa
atgatccgctcaccacacgccgcgaattccctgcaacttttgcttgtcttcctgctggcgacgacgacgctactgacatcggcgaaggatttggctgcgccaagaaggcaagaagggcatggccgggtggttccatcaacggccaccctcgccggttgccagagctcatgcggcgatctgaccttcgtgtaccccttcggcatcggctccggctgcttccgaagtcccgacttcgagctcacctgcgactccaccacaagccctccgagactcctcttccacgatggtatcacccaaattgctggtagtattaacatcgtttctacagagtttatggacacagataacagtgttagcacccgcttttctcataccatctccatgagaaatgcatccgttgtgagctggtcgttatctccaaaattgcttgaacattctcttgatgctttttacctgacgctgtggggactacgtttctccggctgtgactttgatgtttattggttaaatcgtccatcaatcaacaaagcaactcccaactgcacagcaacctgtcctaaaggagagagcacgggtatggtgtctcctatgcagcattgcaacggcacaggatgttgcactatcgactttggtgccgagatcaatgcttattcatctactatcgaatttaaattcgtccgccaagcagaaaccaatctagaatcgtaccataaccgaagcttgtcatgggatacgatctatatcactgatcctgcttcgcgtggtctcagttggaagatccctgatcaaccagactgcgcaagcgcccgtaaaaaccagacgagctatgcttgtgttagcaacaagagcatttgcatcgacccagacgacgtcaaacaaggctacaactgcatgtgccgtaatggctacataggcaatccttatattttggatggctgttcaccgaataatgatgcaaaacgaaacagctctggatatgcctgcataagcaccaacagcgagtgtataacaagcaaacctactgatacgtttgttggttaccgatgcaaatgtgcacagggataccaaggaaatccatacataacaaatggttgtgtcgggatggtcgtaggtggtggtcaaaccaccggtgaccggcggatatag

SEQ ID NO: 94 - protein, 381 aa, Oryza sativa
MIRSPHAANSLQLLLVFLLATTTLLTSAKDLAAPRRQEGHGRVVPSTATLAGCQSSCGDLTFVYPFGIGSGCFRSPDFELTCDSTTSPPRLLFHDGITQIAGSINIVSTEFMDTDNSVSTRFSHTISMRNASVVSWSLSPKLLEHSLDAFYLTLWGLRFSGCDFDVYWLNRPSINKATPNCTATCPKGESTGMVSPMQHCNGTGCCTIDFGAEINAYSSTIEFKFVRQAETNLESYHNRSLSWDTIYITDPASRGLSWKIPDQPDCASARKNQTSYACVSNKSICIDPDDVKQGYNCMCRNGYIGNPYILDGCSPNNDAKRNSSGYACISTNSECITSKPTDTFVGYRCKCAQGYQGNPYITNGCVGMVVGGGQTTGDRRI

SEQ ID NO: 95 - DNA, 1866 bp, Oryza sativa
atggcgatgacaagaggtagagctcaccggcgaccgaggaaggaggagctccggcggatttccggcgaagaggggcggccggccgaggtcctcctcgtccttgcggacgtgagggaggcaacggcgcgagtcgacgtcgaccgaagcggcggcgcgacgcggcttggaggcggtgaaaggggcggcggcctcgggtgtgcggtgggagtggtgctcgaggggtggagagggggaaataagaggcggccggacttccccttgcggtggcgaagctggcggtggcggtggctcggcgcggcgacggctgtggcggcgggaaacggcgaccggagctcgccggagtgtggcagcgcgtgggtgcggcgtggggagagcgagggagagtatgccgggctcgggaaaaatggggaaacggacgaggggagcacggggatgctttttatgggctcgggaaggcgggatcgaggccggacgtggcggaatcggccggcgaagtggggcgccgacgtggggtggtggaggggacagatgggttatttgggaagtgctatacccagaaaccatcatgcagatattgatgaatgcaaagaaccgaagaaatacccttgttatggaaactgcaaaaatataccagggcatttcgactgtacatgccctaagggtacccgaggaaatgcctttgttgaaggagcatgccaaaaaatcatcttaacatccggagtacgaatagcaattggagttgttgcgggtgcattggttggcctctttggtttccttggatggggggtgatcaagtacaaacagagaataaaaaaacaagctctattaagacaggctgatgagttttttcaacaacacggaggtcagctccttctagaaatgatgaaggtagagggcaatgcggggttcaccctctatgagagagagcggatcaagattgcaacaaataacttcaacaaggcacacattattggggaaggaggacagggaactgtttacagagcagtgatagatggcactaccatggcaataaagaggtgcaaggagattaatgagagcaaaaaaatggactttgtgcaggaattggtcatcctttgtcgcgtcaaccataccaacatcgtcaggctgttgggttgttgccttcagtttgaggcacctatgcttgtctatgagtttgtgcaaaacaaaacactacaagagctgttggatctccagaggagcaagaggtttcatgtcacactaggaacacgtctaaggatcgctgcagaatccgcagatgcatttgcacatctctactcgctgccacgtccaatactccacggcgatgtgaagccagccaacattcttctcgcagagggattggttgcgaaggtgtccgactttggttgttcaacaatcgatgagaaaacccaagttgtgccaaaaggtacaccaggctatattgatccggactatctactcgagtaccagctcacagccagcaacgatgtatatagctttggagtcattcttctcgagcttctcactagtaggaggccattttcaaaagaaaggaagagcttaacatcaatgtttcaggaagctatggcaaatggcacacttgtcgagctccttgatagcgacatagttgatgaagctagcatgcgagtgatccaacaagccgcggttctagctaatcaatgcttggttgttccagcattagcagatgaagtgcagcagtacccacaaccgccattggtgcttgaggacctaagctttacggggatagggagaacatcgatgtctacatggtacggtgggagcaaaacaaatggggtttatggcctctcgaagaaagctgtgccgagcatagagtttgcgagatga

SEQ ID NO: 96 - protein, 621 aa, Oryza sativa
MAMTRGRAHRRPRKEELRRISGEEGRPAEVLLVLADVREATARVDVDRSGGATRLGGGERGGGLGCAVGVVLEGWRGGNKRRPDFPLRWRSWRWRWLGAATAVAAGNGDRSSPECGSAWVRRGESEGEYAGLGKNGETDEGSTGMLFMGSGRRDRGRTWRNRPAKWGADVGWWRGQMGYLGSAIPRNHHADIDECKEPKKYPCYGNCKNIPGHFDCTCPKGTRGNAFVEGACQKIILTSGVRIAIGVVAGALVGLFGFLGWGVIKYKQRIKKQALLRQADEFFQQHGGQLLLEMMKVEGNAGFTLYERERIKIATNNFNKAHIIGEGGQGTVYRAVIDGTTMAIKRCKEINESKKMDFVQELVILCRVNHTNIVRLLGCCLQFEAPMLVYEFVQNKTLQELLDLQRSKRFHVTLGTRLRIAAESADAFAHLYSLPRPILHGDVKPANILLAEGLVAKVSDFGCSTIDEKTQVVPKGTPGYIDPDYLLEYQLTASNDVYSFGVILLELLTSRRPFSKERKSLTSMFQEAMANGTLVELLDSDIVDEASMRVIQQAAVLANQCLVVPALADEVQQYPQPPLVLEDLSFTGIGRTSMSTWYGGSKTNGVYGLSKKAVPSIEFAR

SEQ ID NO: 97 - DNA, 2541 bp, Oryza sativa
ggattcatctcaaattctcaacgctggctctactcatcttcatatacaagcacaagtccataatcacctatcaagaaacagaggtttaagacacaaacagatagctaggactagctagttcatccatccaccatgactagccacagaggactaacaacaacaacgctgtgcctcgccatagcgattgctgcagagctcctcgctgggagagcagaggggcaatgccagaacaccaagtgtggcgacgttgagatcccttacccattcagcaccagcttggacaagtgcgccgcgtccgccttcgaattcgactgcaacgacaccggcaacggcgtctacaagcccttctacggaaatgtggaggtgctcagcgtctccctccagcttggccaggtccgggtgatgaatcacatctcctcttcctgctacaacttatcttctaaggagatggactccgacacgtggcagctcaacatgactggcacgccgttcatgctctccgactccaacaagttcacggtcgtcggctgccggacacaagcctacatcgccgaccaggattacgtggggaagtacatgagcgggtgcgtgtccgtgtgccggcgaggtgatgtgtggaaggcgacaaacggcacctgctccgggataggctgctgccagacggccatcccaaagggcctggattactaccaggccttcttcgacgacagcagcatgaacacgtcggggatctacaaccgcaccccctgcagctacgcggtgctaatggactcctccaacttcaccttctcgaccacctacttgactacatcggaattcaacaacacctatgatggccgggcgcctatggtgctcgattgggccatccggagcgccaacagttgtgaggaggcatggaagaagatggactcttacgcgtgcaaaagtaccaacagcgagtgcttcaactcaaccaacggacctggctacacctgcaactgctccaaagggtacgaaggcaatccttacctcgaaggacccaacggctgtcgagatattgatgaatgtcaagattccaagactcatcattgctatggagaatgccgtaataaacctggcggttttgattgtaactgtccagcgggcagcaaaggaaatgctaccattccagatggatgccgaaaagacttccgcttgccgctaaaagcacgactggcaattggagcggttatctgcgtattagttggcctctttagtttccttggatgggaagtgatacgccacaaaaggagcataaaaaaacaagcactattaagacagactcatgaattttttctacagcatggtggccagctacttctggaaatgatgaaagtagagggtaatgttggattcaccctctatgagagaggggagattgagactgccacaagtaacttcaacaaggaacacatcatcggtgaaggtggccagggaactgtttatagggcggccttgaacggagttaatgttgcaataaaaaagtgcaaggagatcgacgagagcagaaagatggaatttgtgcaggagttggtcatactttgccgtgtcaggcatcccaacattgtcaagctacttggatgttgcctccagtttgaggcgcccatgcttgtgtacgagttcgtgcagaacaaaacactacaagagttactagatctccataggagcaagaggttccatgtaactcttggaacccgcatgaggatcgctgcagaatctgccgaggcacttgcgcatcttcactcgttgccacaccctataatccacggcgatgtgaaaccatccaatatcctacttgctgagggattgatcgcaaaggtgtctgactttggctgctcgacaatcgatgagaatactcaagctgtacccaaaggaacaccagggtatattgatccagactacctactagagtaccaactcacatctaagaatgatgtatatagtttcggagttattcttcttgagcttctaactagtaagaagccgctgtcaaaagataggaagagcctcaccttgatgtttcaggaggcaatggcagagggcacactctttgagctccttgatagtgacatggttgatgaagctagtatgagagtgatgcatcaggcagctgttctagcaagtcaatgcttggttgttccaggtatgacaaggccgacaatggtgctggtggcagcggagctccggcgcctagcactagctgatgaagtgcaacaatgcccacaaccgccgcttgtacttgaggatttgagctttgtggagatgggaagcacaaccagtggagtttatagccttgagaagaaagctgtgttgagcatagaatttgcaagatgatctatagacagtttgttgtattgattcccgcgcgtggtttgtaggtgtgtgttagattgagttttcttcctagtgatgaactgaatctgtaaaatagcatagtagcatttaggtgcgctttagaattaaagataaacatagttgtaataaaataactagtgatggtatttatacagttccaaagtgagc

SEQ ID NO: 98 - protein, 739 aa, Oryza sativa
MTSHRGLTTTTLCLAIAIAAELLAGRAEGQCQNTKCGDVEIPYPFSTSLDKCAASAFEFDCNDTGNGVYKPFYGNVEVLSVSLQLGQVRVMNHISSSCYNLSSKEMDSDTWQLNMTGTPFMLSDSNKFTVVGCRTQAYIADQDYVGKYMSGCVSVCRRGDVWKATNGTCSGIGCCQTAIPKGLDYYQAFFDDSSMNTSGIYNRTPCSYAVLMDSSNFTFSTTYLTTSEFNNTYDGRAPMVLDWAIRSANSCEEAWKKMDSYACKSTNSECFNSTNGPGYTCNCSKGYEGNPYLEGPNGCRDIDECQDSKTHHCYGECRNKPGGFDCNCPAGSKGNATIPDGCRKDFRLPLKARLAIGAVICVLVGLFSFLGWEVIRHKRSIKKQALLRQTHEFFLQHGGQLLLEMMKVEGNVGFTLYERGEIETATSNFNKEHIIGEGGQGTVYRAALNGVNVAIKKCKEIDESRKMEFVQELVILCRVRHPNIVKLLGCCLQFEAPMLVYEFVQNKTLQELLDLHRSKRFHVTLGTRMRIAAESAEALAHLHSLPHPIIHGDVKPSNILLAEGLIAKVSDFGCSTIDENTQAVPKGTPGYIDPDYLLEYQLTSKNDVYSFGVILLELLTSKKPLSKDRKSLTLMFQEAMAEGTLFELLDSDMVDEASMRVMHQAAVLASQCLVVPGMTRPTMVLVAAELRRLALADEVQQCPQPPLVLEDLSFVEMGSTTSGVYSLEKKAVLSIEFAR

SEQ ID NO: 99 - DNA, 2124 bp, Oryza sativa
atggcttcctatggtgagctaacaatatcatgtctcacggccatagctgttgctggggcggcgttgctcgccggcggcgcagaggcgcaatgcctgcacacctgcggcggcatagacatcccttacccttttggcatcggatctgacggcgactgtgcattgcctttttacaatatcgactgcaacaacaaaaaaccattctaccgagatgtggaggtcctcagcatctccctccagcttggtcagatcagggtgagcacccccatatcttcttcttgctacaaccccttctctaagaggatgtactccagcgggtgggggttcaacctgtcatacacacctttcatgctgtcggactccaacaagttcacggtcgtcgggtgccagtcattggcctacatttccgacccaaccagcaactacacgagcggctgcgcgtcctcctgcccgggtggtaaagtggtgagcgccaccaacagaacctgctccaggataggatgttgccagataaccatccccagaggcatggaattctgcaaggtgtcgttcggggagagcatgaacacatcgggaatctacgaacacaccccctgcagctatgcagcgataatggactactcgaatttcactttctcaaccagcaacttgacttctctgctagagtttaacaacacctacagtggccgagcgccggtgaagtttgactgggctatctggggtccccgagactgcgtggaagcgcagaaaaatctcacatcgtacgcgtgcaaaagcgaccatagcgtgtgcctcaattattccagtggagcaaaatcagcctacatgtgcaactgctccaaaggataccatggcaatccttaccttcaaggctcaaatggttgtgaagatattaatgaatgtgaacatcctgagagttacccgtgctatggagaatgccacaataaagacggcggatttgattgtttctgtcgtgatggtgttgttgcctgcatattatctatcctcttcggtttccttggatgggaagtgatacggcacaaaaggagcataaaaagacaagctttattaagacaaaacgatgagttttttcaacagcacggaggacagctattgctagaaatgatgaaagtagagggcaatgcagggtttacactctacggtagacaagagattgagactgccacaaataacttcaacaaagcgaacatcattggggaaggagggcagggaactgtttatagggcggtattgggtggaatcgccgtcgcaattaaaatgtgcaaggagattgacgagaacaggaagatggaatttgtgcaggaactggtcatactttgccgtgtcaaccatcccaacattgtcaagttgctcggttgttgcctgcagtttgaggcacccatgcttgtgtacgagtttgtgcaaaacaaaacactgaaagagttgttggatctccaaaggagcacgaggttccatgtcacactaggaacccgcctaagaattgctgcggaatctgccggggcatttgcgcatctgcactcattgtcgcaccctatactccatggtgatgtgaagccggccaacatcctactggctgagggattggtcgcaaaggtgtcggactttggctgctcaacaattgatgagagtactccggctgtgccaaaaggcacgccagggtatattgatccagactacctactcgagtatcaactcacagccaagaatgacgtatatagcttcggtgttattcttcttgagcttttaactggtaagaagccattctcaaaagaaaggaagagcttgaccttgatgtttcaggaggctatggtaaatggcacactccaggacctccttgacagtgacatagtcgatgaagctagcatgagagtaatccatcgagttgcagtgctggcaagtcagtgtttggttgttccaggtacaacgagaccgtcaatggctttagtggtggaggagctctggcggcttgcgctagcagatgaattgcagcgatacccgcagccaccactggtgcttgaggagttgagctttctggatacgggaagcaccagtgggatttacagccttgataataaggccgtgttaagcacaacattcgctagatga

SEQ ID NO: 100 - protein, 707 aa, Oryza sativa
MASYGELTISCLTAIAVAGAALLAGGAEAQCLHTCGGIDIPYPFGIGSDGDCALPFYNIDCNNKKPFYRDVEVLSISLQLGQIRVSTPISSSCYNPFSKRMYSSGWGFNLSYTPFMLSDSNKFTVVGCQSLAYISDPTSNYTSGCASSCPGGKVVSATNRTCSRIGCCQITIPRGMEFCKVSFGESMNTSGIYEHTPCSYAAIMDYSNFTFSTSNLTSLLEFNNTYSGRAPVKFDWAIWGPRDCVEAQKNLTSYACKSDHSVCLNYSSGAKSAYMCNCSKGYHGNPYLQGSNGCEDINECEHPESYPCYGECHNKDGGFDCFCRDGVVACILSILFGFLGWEVIRHKRSIKRQALLRQNDEFFQQHGGQLLLEMMKVEGNAGFTLYGRQEIETATNNFNKANIIGEGGQGTVYRAVLGGIAVAIKMCKEIDENRKMEFVQELVILCRVNHPNIVKLLGCCLQFEAPMLVYEFVQNKTLKELLDLQRSTRFHVTLGTRLRIAAESAGAFAHLHSLSHPILHGDVKPANILLAEGLVAKVSDFGCSTIDESTPAVPKGTPGYIDPDYLLEYQLTAKNDVYSFGVILLELLTGKKPFSKERKSLTLMFQEAMVNGTLQDLLDSDIVDEASMRVIHRVAVLASQCLVVPGTTRPSMALVVEELWRLALADELQRYPQPPLVLEELSFLDTGSTSGIYSLDNKAVLSTTFAR

SEQ ID NO: 101 - DNA, 2522 bp, Oryza sativa
atggcgttccagttccacacgctactatcagccgtaacaatatggctgggcgtagcggctgctacggcgaggctccatgccgccgtcgccggagcacgagcgccgccgccgccgccgccgcccggcaactgccaaaggaagtgcggcgacgtagacatcccctacccgttcggcgtctggaacggcagcgagtccgacggctgcgccgttccaggcttctacctgaactgcgacgtcgacgacaaccacgtctacaggccgttccacgggaatgtggaggttctcagcatctccctgccgaccgggcaggcccgggtgacgaactccatctcctccgcttgctacaacaccagctcccgcgacatggactacaacgactggcagatcaacttcaccggcacgccgctgacgatctccgacgccgacaacaagttcaccgtcgtcgggtgccagacgctggcgtacatcaccgacgacgacaacatgggcaagtacacgagcgggtgcgtcgccatgtgccagggaggcgacctgacgagcctcgccaccaacgggtcgtgctccgggataggctgctgccagacagccatccccaggggtctgaagtactaccgcgtcaggttcgacacgggcttcaacacctcggagatctacaacgtcagccgctgcagctacgcggtgctgatggagtcgaaggccttcagcttccggacgagctacgtgagctcgctggaatttaacagcagcaacggtggcagggtgccgttggtggtggattgggctatcggaaacgagacttgtgataaagcccgcagaaaggttgacacctatgcatgtgtcagccacaacagcaagtgcttcaactcgtccaacggaccaggctacatctgcaactgctccgaagggtaccaaggtaacccctacctgcaggacgggcagcacggttgcacagatatagacgagtgtgcggatccgaagtacccttgttccgtgcctggaacttgccataatcttcctggcgggttcgagtgcttatgccctcgcagtcgtcccaaaggcaacgcattcaatgggacatgcgagagagatcaaacccttcatactggaggaaaagtagctattggaatttccggttttgctatcgttggcctcgttgtttttcttgtacgagaagtgatccagcacaaacgaagtatcaaaagacaagctctgcagagacagactgacatgtattttcaacaacacggaggacagatcttactagaactgatgaaagtagagagcagcgctgagttcaccctctacgacagagagaagatcgaggtagccacaaacaatttcgccaaggagaacattgttggcaaaggagggcaggggaccgtttacaaggctgtcctcgacggcaccactgttgcgataaagaggtgcaacgaggttgatgagagcagaagagccgacttcgtgcaggagctggtcatactctgtcgtgtcaaccacccaaatatcgtcaaactagtcggctgctgcctgcagttcgaggcccccatgctaatctatgagttcgtgcagaacaagacactgcaagagctactggacctccaaaggagtaggaagttccacgtcacactggcgacccgcttaaggattgctgcagaatccgccaatgcacttgcacatctccactcactgccgcgcccaatactccacggcgacgtgaagccagccaacatacttcttgctgaaggattggttgcaaaggtgtctgactttggttgctcaacgattgatgagaaaacccaagctgttgtaaaaggtacaccgggatatctcgacccagactatctacttgagtaccagctcacagccaagaatgatgtatacagctttggggtcattcttcttgagctcctaacgggtaagaagccactttcaaaagaacggacgagcttgatcccaatatttcaaggggcaatggaaagtggcaaactcgttgagctcctggacagtgacatagtagatgaagccaacatgggagttatctgtcaggcagcatcactagctagtcaatgcttggctaatccaagttcatcaaggccaacaatgaggcaagtggcggagcagcttcgacgactagcattggcagatgaagtacaacaatgcccacaaccgccgctagtgctcgatggcctcatcctcacagagatggggagcacaacatcatcatggtacacaggaagtggaacaagcggggtttataaccttgagaacaatgtcgttctaagcacagaattcgctagatgatccatagaccccttgtgctttattgagtgttacaatgtgttgttttatctgtgttagattatgagttgtgttgttttatctctgtgttagattatgagttaattcttcccagttgtggtggttgacgggcttcccaatgtgtgcggctgtaaccatgcattgtgaggaacaagtgaaacaatcatgtttcacaatatataataattcaagtgcatcaaaca

SEQ ID NO: 102 - protein, 766 aa, Oryza sativa
MAFQFHTLLSAVTIWLGVAAATARLHAAVAGARAPPPPPPPGNCQRKCGDVDIPYPFGVWNGSESDGCAVPGFYLNCDVDDNHVYRPFHGNVEVLSISLPTGQARVTNSISSACYNTSSRDMDYNDWQINFTGTPLTISDADNKFTVVGCQTLAYITDDDNMGKYTSGCVAMCQGGDLTSLATNGSCSGIGCCQTAIPRGLKYYRVRFDTGFNTSEIYNVSRCSYAVLMESKAFSFRTSYVSSLEFNSSNGGRVPLVVDWAIGNETCDKARRKVDTYACVSHNSKCFNSSNGPGYICNCSEGYQGNPYLQDGQHGCTDIDECADPKYPCSVPGTCHNLPGGFECLCPRSRPKGNAFNGTCERDQTLHTGGKVAIGISGFAIVGLVVFLVREVIQHKRSIKRQALQRQTDMYFQQHGGQILLELMKVESSAEFTLYDREKIEVATNNFAKENIVGKGGQGTVYKAVLDGTTVAIKRCNEVDESRRADFVQELVILCRVNHPNIVKLVGCCLQFEAPMLIYEFVQNKTLQELLDLQRSRKFHVTLATRLRIAAESANALAHLHSLPRPILHGDVKPANILLAEGLVAKVSDFGCSTIDEKTQAVVKGTPGYLDPDYLLEYQLTAKNDVYSFGVILLELLTGKKPLSKERTSLIPIFQGAMESGKLVELLDSDIVDEANMGVICQAASLASQCLANPSSSRPTMRQVAEQLRRLALADEVQQCPQPPLVLDGLILTEMGSTTSSWYTGSGTSGVYNLENNVVLSTEFAR

SEQ ID NO: 103 - DNA, 2649 bp, Oryza sativa
gaggttgcaaaagtagtgtgctcgatatatccaccaaaagcacacagatattcgcttatccatgtctccccaccgaggagcagctgtggcttctatttgcgctgcgttttatgatagtatttggctattggtactactgctgagcacggcgctggctgcagagacactcgacggtgcgcaggcagcgtcgtcgcaatgccagaacgccaccaagtgcggtggtgtagacatcgtctacccgttcggcctcagttcaagcggctgcgctatgtcgccttcctttgaagtcgactgcaacaacaccgggaatggcgtccagaagccattccttggatatgtcgagctcctcagcatcgatgtccagcttagtcaggcccgcgtgaggactcgtatatcttcttcctgctataacatctcaacccgagagatgaacttcgatgacctgtggtatgtggacctgaaggacacgccgtacaggttctcggactccgccaacaagttcactattattgggtgccgaacactggcatacatcgccgatcaggatgacgtgggcaagtacatgagcggctgtgtctccgtctgccggcgaggtgaactaacgagcctgatcaatggcacctgttctgggaaaggctgttgtcagactgccatcccaaagggcctcgattactaccaggtgtggtttgagcaaagcatgaacacgtcggggatctataatcgaaccccctgcagctacgctgtgctcatggaagcgtccaacttctccttttcaaccacctacctgacttcaccgttcgagttcaacaatacctatggcggcgaggcaccggtggtgcttgattgggctatcaacaccgccaacacttgtgaggaagctatgggaaatctcacatcctatgcttgcaaaagcgacaatgcaaagtgtatcaactcctccgatacaacaggctacatctgtaggtgccaagaaggataccaaggcaatccttaccttaaaggtcccaacggttgtcaagatattaatgaatgtcaacatggagagaattacccttgctatggagattgctacaataaacctggaagtttcgattgtgtgtgtcatgcgggtagtagtggaaatgcggcaattcaaggaggatgccgaaaagacctcttatcaccgaaaacacgactggcaattggtgttgttgccagtgtattggctgtcctctttggattcctaggatgggaagtgattcgacacaaacaaaaaattaaacgacaggctctattaagacagactgatgagttttttcaacaacatggaggccagatattgctagaaatgatgaaagcagatggaaatgatgggttcaccctctacaagagaggggagatagagactgccacaaataatttcagcaaggcacatgtcattggggaaggagggcagggaacagtttataaggctgttatagatggagttgccgtcgcaataaagaagtgcaaggagattgacgagagcaggaagatggagtttgtgcaagagctggtcatactttgtcgtgttagccatcccaacattgtcaagttgcttggctgttgcctccaatttgaggcaccgatgcttgtgtatgagtttgtacagaacaaaacactgcaagagctgctagatcttcagaggagtaggcggttccatgtcacactgggaacccgcctaaggattgctgctgaatccgcagacgcactttcacatctccactctttgccacacccaatactccatggtgatgtgaagacagccaacatccttctcgcaaatggcttggttgcaaaggtgtctgattttggatgttcgacgattgataagagaactcaggctgtacccaaaggcacaccagggtatattgacccggactatctagttgagtaccaactcacaaccagaaatgatgtgtatagcttcggagtcattcttcttgagcttctaaccggtaggaggccactgtcaaaagaaagaaaaagcttaacactgatgtttcaggaggctaggtccaatggcacactcattgagctccttgacagtgacattgttgatgaaacgagcatgagagtgatcaagcgggctgcagatctagtgagtcaatgcttggttgttccgggtacgacaaggccatcaatgacactagtggcagcggagctccgccgattagcggaagcagatgaagtgaagcgaagcccacagccaccattggtgctcgaggatctgagatttatggatatgggcagtacaacgaacactttgtatggagagagcaggacgagtggggcttatagcttggagaagaaagctgtgttgagtatagagtttgcgagatgatcgatgtattacttgttatattgattcccttgtgtcgttttctagtgcgtgttggatttagtgttcttcctcactttgggggtggaggatctggtttagtttttttttttatttttgacttgaggatctggtttagttgtgtgtgatagtgaaacatttgttgtgtggatgtggagtaacagtacaagaacctgtaaaacattatagcattaagtgtattctataactaatgattagtagaattgtaatctaacaaaactatacagtacttcttttattgttgttgc

SEQ ID NO: 104 - protein, 766 aa, Oryza sativa
MSPHRGAAVASICAAFYDSIWLLVLLLSTALAAETLDGAQAASSQCQNATKCGGVDIVYPFGLSSSGCAMSPSFEVDCNNTGNGVQKPFLGYVELLSIDVQLSQARVRTRISSSCYNISTREMNFDDLWYVDLKDTPYRFSDSANKFTIIGCRTLAYIADQDDVGKYMSGCVSVCRRGELTSLINGTCSGKGCCQTAIPKGLDYYQVWFEQSMNTSGIYNRTPCSYAVLMEASNFSFSTTYLTSPFEFNNTYGGEAPVVLDWAINTANTCEEAMGNLTSYACKSDNAKCINSSDTTGYICRCQEGYQGNPYLKGPNGCQDINECQHGENYPCYGDCYNKPGSFDCVCHAGSSGNAAIQGGCRKDLLSPKTRLAIGVVASVLAVLFGFLGWEVIRHKQKIKRQALLRQTDEFFQQHGGQILLEMMKADGNDGFTLYKRGEIETATNNFSKAHVIGEGGQGTVYKAVIDGVAVAIKKCKEIDESRKMEFVQELVILCRVSHPNIVKLLGCCLQFEAPMLVYEFVQNKTLQELLDLQRSRRFHVTLGTRLRIAAESADALSHLHSLPHPILHGDVKTANILLANGLVAKVSDFGCSTIDKRTQAVPKGTPGYIDPDYLVEYQLTTRNDVYSFGVILLELLTGRRPLSKERKSLTLMFQEARSNGTLIELLDSDIVDETSMRVIKRAADLVSQCLVVPGTTRPSMTLVAAELRRLAEADEVKRSPQPPLVLEDLRFMDMGSTTNTLYGESRTSGAYSLEKKAVLSIEFAR

SEQ ID NO: 105 - DNA, 2055 bp, Oryza sativa
atgccattccacatgctagcttcactactatggctctgcggagggatcgcggcatattgctcggccgcctctgcagccacctgcgtgagaagctgcggcggggtagagatcccttacccgttcggcctggatcctgcctgcgccctgcccggcttcaacctcacctgcaacatcaaaggagatggcaagccgtattacaaagacgtggagctgcttaacatctcgctgacagaaggtcaggtacgaatgaggatgcacatagctaactattgctacaatagtacttctggcgggatgaacggtacgggctggtcgctaaacttaacgggcacaccatttagattatccgacttcggcaacaagttcacggccatcgggtgtcgaacgctcgcttacctcttagcagacgatgtgttaacaaccgggtgtgtggccacatgcaaggcagacgacctcttgaggctcccagacggtgtctgctccgggataggttgctgccagacagccatccccaaggggctacagtactatggggtcatgtttgactcgggcttcaacacgacggagatcaacaacatgagccgttgcagctatgcggcactcatggaggcatccagcttcaacttctctaagaactaccctacttcttcatcgttcaatgatcattaccgtgggcgagcgccgctgcttgtggattgggccatcggaaatgagacctgtgatgtagcacgctatagatgcaactgctcccaaggatttcatggaaatccttacctgaaaccagaagatcccgacagctgccaagatattgatgagtgcaaggaaccatataagtacccctgccatggaaaatgcagaaataaagttggaggaatttgtgcctctcttgtggttgctctaacgactttacttgggatagaatggatcaagtacaaacaacgaatcaaaaggcaagacatcatgaggaagaggggcgagtattttcatctacacggaggccaattgttaacagatatgatgaacatagagaacaacatttcatttaagctgtatgaccgagatgacattgagttggccaccaaaggctttgacaagacatcaatcattggtgaaggaggtcagggtactgtttttaaagggtataatcttgatcaagtgaacaaccctgttgcgatcaaaaagtgcaagggatttgatgagaatagtaggacagaatttacacaggagctgctcatactttctcgagtcaaccatgaaaacatcgtcaagcttcttggttgttgtctgcaatttgaagttccagttcttgtgtacgaatttgtccccaataagactttgcactatctaatccacagccaaaatgatccatccatcagaacactggagatccgcctaaaagttgctgccgaatctgctgaagcattttcatatctacactcactggaccaccctatcttacatggggatgtcaagtcgatgaacatactgcttagtaacaattttattgcaaagatttctgattttgggtgctccaaaattagggcagctgatggacacgatgacgtggtgaaaggtacgattggctatctagatccagagtacctgctgaagttcgagctcactgacaagagtgacgtgtacagctttggtgtcgttcttcttgagcttttaacacgccgtacaccattatctaagcagaaggtcagcctcgcatcagtatttcaagaggccatgaaggaaggcctgtttcttgagctcatagacacagaaatattacatgaggataacatgggattgattggtgatctagcaaggctggcatgccagtgtttagcaatgactagtgagagcagaccaacaatgtgcaggattgcagaggaattgcgacgaatagaaaaacgagtacgacaacaccgtggggtacttacaactattagttcaatgtcattgttagcaagttcatctgcagacacatcattgcatttcacaggtgaaaccaatggctacaacagccttaggagcgtggctgcaatgagcatagaatttgctagatga

SEQ ID NO: 106 - protein, 684 aa, Oryza sativa
MPFHMLASLLWLCGGIAAYCSAASAATCVRSCGGVEIPYPFGLDPACALPGFNLTCNIKGDGKPYYKDVELLNISLTEGQVRMRMHIANYCYNSTSGGMNGTGWSLNLTGTPFRLSDFGNKFTAIGCRTLAYLLADDVLTTGCVATCKADDLLRLPDGVCSGIGCCQTAIPKGLQYYGVMFDSGFNTTEINNMSRCSYAALMEASSFNFSKNYPTSSSFNDHYRGRAPLLVDWAIGNETCDVARYRCNCSQGFHGNPYLKPEDPDSCQDIDECKEPYKYPCHGKCRNKVGGICASLVVALTTLLGIEWIKYKQRIKRQDIMRKRGEYFHLHGGQLLTDMMNIENNISFKLYDRDDIELATKGFDKTSIIGEGGQGTVFKGYNLDQVNNPVAIKKCKGFDENSRTEFTQELLILSRVNHENIVKLLGCCLQFEVPVLVYEFVPNKTLHYLIHSQNDPSIRTLEIRLKVAAESAEAFSYLHSLDHPILHGDVKSMNILLSNNFIAKISDFGCSKIRAADGHDDVVKGTIGYLDPEYLLKFELTDKSDVYSFGVVLLELLTRRTPLSKQKVSLASVFQEAMKEGLFLELIDTEILHEDNMGLIGDLARLACQCLAMTSESRPTMCRIAEELRRIEKRVRQHRGVLTTISSMSLLASSSADTSLHFTGETNGYNSLRSVAAMSIEFAR

SEQ ID NO: 107 - DNA, 1254 bp, Oryza sativa
atgctatggctcgccatagcgttcgcttctttggagctcggcctcatcaccggcggtgcagtggcggaatgcccggacaccaagtgcggcagcgtggacatcccttacccattcagcatcggcccaggccgctgcgccatgcctggatttgagctagcctgcaagaactccaggccgttcctcggagatttcgaggtcgtcaacatctcccttcagctcagtcagctccgggtgctgaataagatatcttctttctgctacaatcctgcatctaagttgatggaaccaaatacatttcagagtgacttggacactccgttcatgttgtccgacaccggcaacaagttcaccgtcatcgggtgccgaacactggcatatattgccgataaggacaacgtgggcaagctcatgagcgggtgcgtgtccgcctgccggcgaggtgacgtgacgagcgccaccaacggtacctgctctggggtaggctgctgccagacaaccatccccaagggcctcccttattaccaggtcttcttcgaccaagccttcaacacgtcggactcgatctacaacgccaccctatgcagttacgctgtgctcatggattcgtccgacttcaagttctcaacaagctacttgacttcgccggagtttaacacctcctacggcggccgggcgccaatgctactggattgggctatccgaactgtgaacaactgtgacgaagcacaaaaaaatctcacgttatacgcgtgtaaaagtgacaagagcgagtgcttcaattcctccaatggaccaggctatatatgcaattgcacaaacgggtaccaaggaaatccttatcgacaggatggttgccaagtggaaacagggttagacggaagagggtctaacagggtaaaaacagggttagatggaagacggaacagggcggcgccacaacattttttcgactcaccatctgactttgatgatgattcacataaaaacatatgcggagaaacaatcaaggagtacataggggatagagacttggagtacaatacaaatgacgtgatcgatgccgtcgttggtgacgcggtcgttgccgtcgtagaggatgcggtcgatgtcgtcgatgaagcgtcttgcagattaatctatcagaggacgcgaggtgtccatctatgtggacgagtcggcagcggcaagttgatgaagaccactgatgatgtagaatcggcgaagacgatcgtcctggagagctcggcggcttga

SEQ ID NO: 108 - protein, 417 aa, Oryza sativa
MLWLAIAFASLELGLITGGAVAECPDTKCGSVDIPYPFSIGPGRCAMPGFELACKNSRPFLGDFEVVNISLQLSQLRVLNKISSFCYNPASKLMEPNTFQSDLDTPFMLSDTGNKFTVIGCRTLAYIADKDNVGKLMSGCVSACRRGDVTSATNGTCSGVGCCQTTIPKGLPYYQVFFDQAFNTSDSIYNATLCSYAVLMDSSDFKFSTSYLTSPEFNTSYGGRAPMLLDWAIRTVNNCDEAQKNLTLYACKSDKSECFNSSNGPGYICNCTNGYQGNPYRQDGCQVETGLDGRGSNRVKTGLDGRRNRAAPQHFFDSPSDFDDDSHKNICGETIKEYIGDRDLEYNTNDVIDAVVGDAVVAVVEDAVDVVDEASCRLIYQRTRGVHLCGRVGSGKLMKTTDDVESAKTIVLESSAA

SEQ ID NO: 109 - DNA, 2406 bp, Oryza sativa
gtaactttgcagcaggtttagttcctcgttctgataaacaagcacacatggtttcctccatggtccttgcacagttgcttctcctctgcttgttatcgctttcctcgagcagttcttcccagatcagcccactcaagtgccccaatagctccgttgatatcccatttcctttcaaaattgccaccaactcaagcttaacgtcaactccaggctttgcgatatcatgtcgtcaaacaggcccaatgattttgctcggtggtaactacagcgtcctcagcatctccctgctcgagggatacgtacgtgtgactggccagaccgtatactcctcccagtgccataacaatagccagggaatcatcgacctcactgccacaaactacatgttctcccacacgcaaaacaagttcaccgccgttggctgtgatgccatggcaatgataagaaacagcagcgatgttgtcggtaacaccaacagcacggtgatgagcagatacagcggggggtgcgtgtcgttctgcgcatcaaatggaagcatcatcagcggcgaatgctccggtgtgggctgctgccagtcgtcagtgcccaaggggctcaacaagctggacttggagttcaccagcatacgggaccagctgatgccacccacgagtgccgtcggtagcggcagcacacggtgcagcaaggcgttcatcgcggagcaggactcgtatgtgttctctaggcatgacctatacaaggacttggggaatctgccgatggtgctcgactggtatatacagggtggcaactgcaaggaggcaagccgcagtcgtcaaacctacatgtgcaaggagaacagttattgctatgaggtggaagatggagctggatatcgctgcaattgctctggaggttacactggcaacccgtacattggatgtgttgatatcgacgaatgcaacgacgggaataactatccatgcacccacaagtgcatcaacatagctggtggttacaattgtacatgcccaatgggcatgacaggagatggcaagaagcaaggcattgggtgtaaaagagatacaacaatgttgtctactgtaggtggaagccttggtttgatggctgttctcattgttcttggcttttggacttactggatagtgaagaagaggaggcttgcaaagcagaaacaacgatacttcttgcaaaatggtggtttgttattgcagcagcagatattcacccaccaagcacctgcaaggatattcaccaccagtgagctcgaagatgcaacaaacaacttcagcgatgaccgtattgttggtcgaggtggatatggtacagtgtataaagggatactatctgatcaaaccattgtggctatcaagaagtcaaagcttgtggatcagagccaaatggagcaatttatcaacgagttgatagttctttcacagattgatcacaaaaatgtggtcaagatattgggctgttgtcttgagactgaagtgcccttactggtttatgaatttatatcgaatggagctctgttccaccaacttcataatacaaatttggtaccaatttcatgggagcatcgtcttaggatagcaactgaaactgcatcagctcttgcaaatcttcacttagcaagaaaggtgccaatcatccatcgtgatgtcaagtctgccaatatactgattgatgagaactacaccgcgaaggtatcagactttggcgcttcaaggctagtcccttccaatcagacacatgtaacaaccttagtccaaggaacattaggatacttggaccctgagtacttttacacaagccaactaactgacaagagcgatgtatatagcttcggtgtggttcttgttgagctattaactagacaaaaaccgatatcttatcataggcaagaggaagggataaatctagcttcacatttcacggcgcttgcccagcagaaccgactacaggagattgtggactgcgtcgtggtgaaggaagctggaatgaggcatgttaatgtggtgtcgcatttgattctgaagtgtttgaagcttaaaggggaagagaggccaaggatggtagaagtagcaattgaacttgaagcgctcagaaggttaatgaaacaacacctgtccctgaaaagtgaaaaggctttgagagagcttatggagcagcaatctgctgaagattgccaagagatgcagttgcttcaagaggagagcggccaggaaaaaatgagtaacattgagccgctgaagttgtaccacagggacagtgcctcggataaatgcatggagagcagtccacttctatcaatggacctcccatggtagtgtacaatatatcaactgaggtggtgtttgaatctcctgaaaatgaaaacaaagataaaaattaagtgttttatgc

SEQ ID NO: 110 - protein, 760 aa, Oryza sativa
MVSSMVLAQLLLLCLLSLSSSSSSQISPLKCPNSSVDIPFPFKIATNSSLTSTPGFAISCRQTGPMILLGGNYSVLSISLLEGYVRVTGQTVYSSQCHNNSQGIIDLTATNYMFSHTQNKFTAVGCDAMAMIRNSSDVVGNTNSTVMSRYSGGCVSFCASNGSIISGECSGVGCCQSSVPKGLNKLDLEFTSIRDQLMPPTSAVGSGSTRCSKAFIAEQDSYVFSRHDLYKDLGNLPMVLDWYIQGGNCKEASRSRQTYMCKENSYCYEVEDGAGYRCNCSGGYTGNPYIGCVDIDECNDGNNYPCTHKCINIAGGYNCTCPMGMTGDGKKQGIGCKRDTTMLSTVGGSLGLMAVLIVLGFWTYWIVKKRRLAKQKQRYFLQNGGLLLQQQIFTHQAPARIFTTSELEDATNNFSDDRIVGRGGYGTVYKGILSDQTIVAIKKSKLVDQSQMEQFINELIVLSQIDHKNVVKILGCCLETEVPLLVYEFISNGALFHQLHNTNLVPISWEHRLRIATETASALANLHLARKVPIIHRDVKSANILIDENYTAKVSDFGASRLVPSNQTHVTTLVQGTLGYLDPEYFYTSQLTDKSDVYSFGVVLVELLTRQKPISYHRQEEGINLASHFTALAQQNRLQEIVDCVVVKEAGMRHVNVVSHLILKCLKLKGEERPRMVEVAIELEALRRLMKQHLSLKSEKALRELMEQQSAEDCQEMQLLQEESGQEKMSNIEPLKLYHRDSASDKCMESSPLLSMDLPW

SEQ ID NO: 111 - DNA, 2270 bp, Oryza sativa
atggcatacacatccaacgctgcctataggaaaggagcaatctccaagggtacttgtgggaggctaattctggagaaaactgcatctgcaaaacacactattgcgacggcagcagttcctagccctcaatgccaaagtcggtgcggggatgttgacatacagtacccgtttggcattggagcgaattgctcactcgcagaattgttcaatgtcgaatgcaaggtccaacatggcatttctaagccatttatcggcaacgttgaggtactaaatatttcgttgagccgtagcacattgcgggtactcaatggcatctcaaccttttgctacaatgcctccggtcttatgggaggggttcattttcgtttcaatgcaaagaatacccccttccggttttcagatgtctacaacaagttcaccgtaattgggtgcaacacccttgcctatatcgccgatgatggtggcacgggttaccaaagtgggtgtttctcgcagtgtcgtgacctgtcagggctagtggatggctcttgttccggcatgggctgctgccagaccacgataccaagaggaatgtactactataatgttacttttgataagagattcaacacaagccagatctcgaggttcggtcggtgcagctatgccgtgctgatggaggcagcatcgttcaatttcagcacgacatacataaacaccaccaagtttaatggcacaaacggcgggcgggtacccatggtgatcgattgggctatcagagagaagtcatgcgatattgccaaacagaacatgacaagctatgcttgtcttagtagcaacagcgagtgtgtggcttccaccaatggacctgggtacgtctgcaactgctctcatggatacgaaggtaacccttatcttccagacccacatggatgccatggggttattataggcttcattgttctcatgatcattgccttctgcggacaattggtaattcaaaggagaaaactgaccaaaatcaagaaagaatattttcgccaacatgggggtatgattttgtttgagagtatgaaatcaaaaaaaggtcttgctttcacagtatttacagaagctgaactcatacatgccacaaacaattttgacaagagcagaataattggccaaggaggtcatggaacggtatataaagggacagtcaaggacaacatgctagtcgcaattaaaagatgtgcactagttgacgaaagacaaaagaaggagttcggccaagaaatgctcatcctatccccaatcaatcacaagaacattataaaactcctaggttgttgccttgaggtcgaagttccgatgctagtctatgagttcgtcccgaatggaacattattcgagcttatccatggaaagaaccaagggttgcaaatctctttcagcaccctcttgaggattgctcatgaagcagctgaagggcttcacttcctacattcctatgcatctccaccaattctccatggtgatgtgaaaactgccaacatacttcttgatgagaactacatggccaaagtgacagacttcggagcatctatactagctccatccgacaaagagcagtttgtcacaatggttcaaggtacatgtggctatctcgatcccgaatacatgcaaacgtgccaattgaccgacaagagcgatgtgtatagcttcggtgttatccttctagagattctcacaggccaagtgccactgaagctcgaaggacctgcgatacaaagaagcttgtcatcagttttcctatctgccatgaaggggaacaatcttgactcggtgttggtgagcgacataaaaggccaagagagcatggaactaatcgggggacttgctgagctagccaagcaatgccttgatatgtgcggcgccaacaggccatcgatgaaagaaatcaccgacgagctgggccgattgaggaagctttcactgcatccttgggtacaagtcgatgcagagatggcaccagagaaccttcttggcggaccatctacaattaatagtggtcttgagattgaaacaagtagtaccggctatcttggggaggaacgtgagaacctaccgatgaacccaggaagtacgtattatgcgaggtgattaaaaggctaaagcatgtaaaatagcattccattaataatttgtgtaccatgctagggcgctaggcgcttaggccaatttgtagaacatgttcaaatattccatttcctctctttctgaacctgcttagtggttattacatgtgtatg

SEQ ID NO: 112 - protein, 706 aa, Oryza sativa
MAYTSNAAYRKGAISKGTCGRLILEKTASAKHTIATAAVPSPQCQSRCGDVDIQYPFGIGANCSLAELFNVECKVQHGISKPFIGNVEVLNISLSRSTLRVLNGISTFCYNASGLMGGVHFRFNAKNTPFRFSDVYNKFTVIGCNTLAYIADDGGTGYQSGCFSQCRDLSGLVDGSCSGMGCCQTTIPRGMYYYNVTFDKRFNTSQISRFGRCSYAVLMEAASFNFSTTYINTTKFNGTNGGRVPMVIDWAIREKSCDIAKQNMTSYACLSSNSECVASTNGPGYVCNCSHGYEGNPYLPDPHGCHGVIIGFIVLMIIAFCGQLVIQRRKLTKIKKEYFRQHGGMILFESMKSKKGLAFTVFTEAELIHATNNFDKSRIIGQGGHGTVYKGTVKDNMLVAIKRCALVDERQKKEFGQEMLILSPINHKNIIKLLGCCLEVEVPMLVYEFVPNGTLFELIHGKNQGLQISFSTLLRIAHEAAEGLHFLHSYASPPILHGDVKTANILLDENYMAKVTDFGASILAPSDKEQFVTMVQGTCGYLDPEYMQTCQLTDKSDVYSFGVILLEILTGQVPLKLEGPAIQRSLSSVFLSAMKGNNLDSVLVSDIKGQESMELIGGLAELAKQCLDMCGANRPSMKEITDELGRLRKLSLHPWVQVDAEMAPENLLGGPSTINSGLEIETSSTGYLGEERENLPMNPGSTYYAR

SEQ ID NO: 113 - DNA, 3055 bp, Oryza sativa
ggattcgacctctacaagcccgaggggattgccactaatcaccagcaacggagcggccaagcagtccaaccgcgccacgctcattgggattgtaaattgtgatttgtgcatggttccggtttatttatgagctccgacttcaattctttcgtccagaaacaatattgaggtattttttacaaccttaacacatttttaatgtttatcgtcattagctatgtctaatctagttttgctagctcaactgaatcattaatcatgaatgcagtcaatacactggtcatatctatatgatgttcaatcattcatgttagtaatgacgtaatcatcagcggctatatactgtagattagcagttctgcacgggagatatttttgacaactgtattaatagcagaggaattaaaaataaaagagagaaaatgaatgatctgatgtggaatgccgggtgttgagcatatttacccaaagcggtatataaaggaaactgctttttgcagccactcccattcttctggccatcgccgatcatgcctttcgggcaaacacacgaagtaactccttgctcatccttgcaggattttgagtacgtgcaagggttcaattctctgcacacatctaggcctaataatagtaaattgcatgcaattaggagatgttttccaaatgaaaaatgattaggccgctactggttcattattagatgttgtaaacaagatttcgaacgttctcccggtacattgaacaaataataatttcctgattagaaagactgcacttaaaatgctcttctgtgtggtgaacaaagcactttgttttatgataccttgcggttggttgtgggtaggggcgcctgcatgagagagagaatatatgatcttggtcagatcatcacgcattattacgagtaactattgcagaatttttttagagaagaaatattacagcgtaatccagccatatataggagatgcatacaatatcattttagcgtttcaaccggaagaaatatatcaattcatattgacatttctttaagtaaaaagggaacaaagctcctatcacccaggcaatcctaagttcatgcatagtcacgttaaaaggaacaaaattcttactgtggtatttattggtagtagaatcaatttagacctttcatcttttctcatccaatcaaacataaaagtacccaggaagaaccgtttaaaagctttttttttttttgagttttccaacttatctcaaaattggtctagaaataacacgtggtgattaatatggttgtttgaacagaaattctagaataagtaggattatatgcaatctaaaaaaatatcccattatcttaaacaaaagcagtcggaaaaaatatatggcatgtatttaccaggtggccgatgggagtcaatgcaccctgtccctgtcctgtagccatcaccagtcttattattggggcaagagcaagtatatcctccgggagtgttatgacagagtacgctacagttgttgtaaatgagagaccggcattcgttgatatcttcataaatagtgtgaagccacattgagaaagcagaaaaatacagttctattcatagcagttagctaagttctatggtaattgaattctgccatgatacaaacagaaagaaactataacaaactgttttcactagctagtgcatattttttagatcactgtgtttagaagtatctactatttaccttggcagccgcctgcctcgtatggattcccgttgtgttggtcgtaccctgctttgcatctgcacacgtagccctctcccatgaacctgtccatgcatgagctctcgttgttgcagcggtactgtgtcttgaagctgttgttccgggcttgctcacaggtggcgcgcccaatcacccagtccaagaccatccttcgctcacccaaaggcaccagaacgtcttccagatgcactggcttgctgtcaccgccgccggctctgaagatgtgctcttcttggtggagatgcattggcttgctgttaccgctgactttgaagatctgctctttttggtagaggatgaaggctgcgctgcaggtgccggccacgctcgccgatgtcttgttgaactcgaaggtgacctcctgcgcgtcgtccaacggcatgccgtaggcgtcgcagcaggccgtcccggggcacaatccgtcagagtttactctgccgttggttgtgcagcttccgttagtagaccaaccatgatggtgtagcgagctggtgaaggtagcagtaaagttggagtaacagccggtggcgacgagcgtgttgcgcttggagaagaagaacggcgtgtccgtcaaattcgtcggcccgattccggtgctccccacgaccggccggccgttgcgatcgtagcacaaccggtagatggggcctgcaaatatgacgacgaaaccttcctgcgaagacacctgatcgattcgaaatttttgatggccaatgcggagcatggcagcactgtcgtttttccggcatgttaccctgaagccaggggcagatttgccttttaagccgaagggataagggacttcgtcgcacgacaggttcttcgtcgtcgtcagctgcgagtttccctctagaggcggccactgattctcccgtccccgggagagcgtgacgtgaggcatcgccgagaagacggcgagcgccagcaccagtggggtgagaggccatgcagccacagcaggatcagctgcagctgcagcggccggtgtgcttgctcttctgcacggcatgtcgtcgcgcctttgcttgctgttctccttctcggtggtgcatacagcatagacgagcgccgagagaagctatgttgggagtgtgaactgtgaaggggtcattgtcgccgaaagcgtgctaattctcttgtggctactggctacatgttggttttaaatttttaattgtttctcagattaacctggaacttctatgtattctcatgagactgaaaaaacttttactccccccaatttttttcagatgttctataatacaagacatatatgcaattaactagc

SEQ ID NO: 114 - protein, 99 aa, Oryza sativa
MHWLAVTAAGSEDVLFLVEMHWLAVTADFEDLLFLVEDEGCAAGAGHARRCLVELEGDLLRVVQRHAVGVAAGRPGAQSVRVYSAVGCAASVSRPTMMV

SEQ ID NO: 115 - DNA, 2649 bp, Oryza sativa
gaatattttgagtaacgtgcccaagtggttcctcaggttgtgagcctgtgacctatttaacctccgatttccagtccattctcctccatgatccaaactttccatcctagttgatagcagtattgccatggtctattttttcttgttaaagactaatggcaaagatgatgctttaccttcttctcctgccattgctcctcctcacatgcatctttgcatcttatgttcattcgatggaatcaagcacctccaagtgctccaatattcccatcccttatccctttggtattcttggtgggaaccctgccccagcccaagggtttgagatcacatgtgcctcatctggcccgatggtacgcattaacaatatcatgtttgggattcttaacatctcgttgctggatggttttgtaagcatcttggccagtgccacttctcagcagtgcaaaaggaattctagcttcagccttgaggggaccaatttcacgttctcagatacaagaaacaaatttacagctctgggttgtgatatggtagccatgctattgaacggtagcagcgggtatagcggtggctgtgcttctttttgctccaccaaaagcaatataattgatggtatgtgctctggcgtggcttgctgccaagcaccagtaccgaaggggttaaagaagcttgagttggagttcactaacataactgggcagctcagcaggcccaaggaggtcaataatactccaacatgtggcgaggctttcatcgtggagcagaactcctatgttttctctagtgttgatctgagcaacactaacaggaacaatcctcaataccgccctgttgttcttgagtggtccattgatggtggctactgtgaggaggcgaaccgcttcatgtcatatgcctgcaaggagaactcctactgctataactcatcaaatggaattggataccgctgcaattgctcccttgggtttcaggggaacccttacttgcaagggcccgatggatgccaagatattgatgaatgcaccattaagaggccatgcacgcataagtgcatcaacacgaaagggagtttctactgcatgtgcccagcagggatgagaggtgatggcttgaaggagggcagtggctgcaatggaattggcacactgttgattggaatagttactggactagctctgctactgcttctccttgttctcatattctggacccattggcttgttaagaagagaaaacttgcgaagataagacagagatactttatgcagaatggtggaatgttgctgaagcagaagatgttttctcaaggtgcaccactgcggatatttacttctagtgaacttgagaaagcaaccaacagcttcagtgatgacaatatcattggtcgaggtggatttgggatcgtgtacaaaggtatattatccaatcaaatggttgtggcaatcaagaaggcgcagcgagttgatcagaaccaaatggaacaattcataaacgagttggtcattctttcacaagtgaaccacaagaatgtggtccagctattaggctgttgtcttgagacagaacttcccttgttagtttatgaattcatcaccaatggggcccttttttctcatcttcaaaatacatctgtcctgatttcatgggaggaccgcctaaggattgcagttgaaactgcatcagcacttgcatacttacacttagctacaaaggaaccaattattcacagggatgtcaagtcatcaaacatactccttgacgagaacttcactgcaaaggtgtctgattttggtgcctcgaggccaataccacacaaccagacccatgtgacaactttagtgcaggggacattggggtacatggaccctgaatatttccaaacaagccagctaactgagaagagtgatgtatacagttttggggtggttcttatcgagctattgacaagacagaaacctatatctgatggtaggacagatgatgtgagaaatctagcatgtcattttagtatgttattctatcagaaccagttgttggaaattgtagattctcaagtagctgaggaagctggcacgaaacatgttaaaaccgttgcacaattggctttacgatgcttaaggtcgagaggtgaagagaggccaaggatgatagaggtggcaattgaacttgaagctctgagaaggctgatgaaacaacacttggtcctgcagaccgaagaagaccctctgctctgcgaatcaggtcagcatgcagatgtaaacatcgaagcatcctccgagtttgagccttgataacattaccaaggaggaggaaagcatggacaccattctactcccattcagggccctctcatgttagtcctcccagcacaaatggttttcccttagttattataactcagtccccagtttcatgacaatgattttctgtgttgctctgagctgccaatcatgtagaaacccagagacgggtatactaggaataattggagagtgttgtcgaactccaatgtctgttcaactatttctcagaaagaaatatctgatcctttcagaagtcaatttggtcttaacatggtggttaaagtaattcatttggaatgtaccaaactttataaagaaatgataggttagtttcccaatgtgc

SEQ ID NO: 116 - protein, 712 aa, Oryza sativa
MAKMMLYLLLLPLLLLTCIFASYVHSMESSTSKCSNIPIPYPFGILGGNPAPAQGFEITCASSGPMVRINNIMFGILNISLLDGFVSILASATSQQCKRNSSFSLEGTNFTFSDTRNKFTALGCDMVAMLLNGSSGYSGGCASFCSTKSNIIDGMCSGVACCQAPVPKGLKKLELEFTNITGQLSRPKEVNNTPTCGEAFIVEQNSYVFSSVDLSNTNRNNPQYRPVVLEWSIDGGYCEEANRFMSYACKENSYCYNSSNGIGYRCNCSLGFQGNPYLQGPDGCQDIDECTIKRPCTHKCINTKGSFYCMCPAGMRGDGLKEGSGCNGIGTLLIGIVTGLALLLLLLVLIFWTHWLVKKRKLAKIRQRYFMQNGGMLLKQKMFSQGAPLRIFTSSELEKATNSFSDDNIIGRGGFGIVYKGILSNQMVVAIKKAQRVDQNQMEQFINELVILSQVNHKNVVQLLGCCLETELPLLVYEFITNGALFSHLQNTSVLISWEDRLRIAVETASALAYLHLATKEPIIHRDVKSSNILLDENFTAKVSDFGASRPIPHNQTHVTTLVQGTLGYMDPEYFQTSQLTEKSDVYSFGVVLIELLTRQKPISDGRTDDVRNLACHFSMLFYQNQLLEIVDSQVAEEAGTKHVKTVAQLALRCLRSRGEERPRMIEVAIELEALRRLMKQHLVLQTEEDPLLCESGQHADVNIEASSEFEP

SEQ ID NO: 117 - DNA, 957 bp, Oryza sativa
atggttgttgttgttgttggggctctgctgtttcatctcgtagtgacagcattggccgcgccggtagccttgcctggctgccccgagacctgcggcaacgtcaccgtcccttaccctttcggcattggccacggctgcttccgcgatggcttcgagctcgcctgcgacgagacgcaccctgctgcaccaccgaagctgcgtttcgcaagaaacggcgtggaagtgatcgacatctccctgccgtccggcacggtgagagtcgccaccaggatgctgggcacggactcctcgtcgtcgctgccgcggcagctcaacggctcgtggccggccggcctgccggcaaatggctccctggcggtgtcgaccaggcacaaccggttcgtcgccatgggctgcaacctcctcgccaacctcgtcgccaacgacgacgacgactacatcagcgtctgcgccgcgctgtgcgtggtccgatccgcgctgccgagggacgccgccgccgcctcaagctgctccggcttcggctgctgccagacgccggtggcgaggggcctcccgtcctacggcgtccacctcaacgacctgacccagaggtcggtcaccgtggggtcgtacggggcggcgttcatcgccgacggcgagtggttcgccggcgagcaacgctccctgcagctcggcttcgtcgctgacccgcggaagctggccgactcgacggcggtcccgacggtgctggagtggtcgctggacatggaccgcgatcaggacatgttctggtacgacaccagggtctctcaatggacgcgatgtgtcagcgtgcacagcgccatcgacgacgctgttgacgggaacctttacggccgagcacggtgcaattgctccaaaggatacgagggaaacccttacctagccaatggatgccaagattgtggtccatgtgtggatgggccagattgtgaataa

SEQ ID NO: 118 - protein, 318 aa, Oryza sativa
MVVVVVGALLFHLVVTALAAPVALPGCPETCGNVTVPYPFGIGHGCFRDGFELACDETHPAAPPKLRFARNGVEVIDISLPSGTVRVATRMLGTDSSSSLPRQLNGSWPAGLPANGSLAVSTRHNRFVAMGCNLLANLVANDDDDYISVCAALCVVRSALPRDAAAASSCSGFGCCQTPVARGLPSYGVHLNDLTQRSVTVGSYGAAFIADGEWFAGEQRSLQLGFVADPRKLADSTAVPTVLEWSLDMDRDQDMFWYDTRVSQWTRCVSVHSAIDDAVDGNLYGRARCNCSKGYEGNPYLANGCQDCGPCVDGPDCE

SEQ ID NO: 119 - DNA, 2352 bp, Oryza sativa
atggctcggcaaggctttcgcccgcgattccctgtccaaacccacaccaccaatccgcatgacggattaattaggcttaataaattcgtctcgcgattttcagcgacgattggagcagtcgtgtttcagcttctggtgacgacgacgacactgtcagcagcagccccgaccccgatagccctgcctggttgcccggaaagctgcggcggcatacaagtgccgtaccctttcggcatcggcgacgggtgctcctaccatggcttcaacctcacatgcgacgacgaggcgcaccaccaccagacgccgcccaagctgttcatggccacagacaacggcaccgtcgtccaagtgctcaacatctccttgccggacggcactgtacgcgtccgcagcaagctttcgcagtcatctattgccggctcctcctcctcctcgtctaatgcctcgtcgtcacggtccgacctaccggccgacgggccgttcacggtgtcctccgcgtataactggctggttgccttcggctgcaacatcgtggccgaccttaccccgtacggcaatatcgccgacggcagcagctgcgccgccacatgtatagatggatggcaaaatttcgcaggcccctcgtgctccggcatcgcgcgctgccgtacgtccgttgggaggggtgtccactcgtacacgatccaggtcacgtctctgatagaccgaaattccatgggtgcctcgacatcgacgacatgggcagctgcgttcgtagctgagcagggctggttcagcgcgaatgagaatgccatgttgtacaacttcaccaattggctgccgttcacggtcgagagtgttccggtggtgctggaatggtggctggatttgatccgtgatggagccatactgccgttgtcagttgggcccaatactaccgactttagatgcctaagcttgcatagttcaagctattacaacgatctaaactacgaccgaagacggtgcaactgttcccaaggatacgaaggcaatccttacatccgtgatggatgccgagatatcgatgagtgccagcagccagatgtttatccgtgtcatggaacatgcatcaatatgcctgggacgtaccgatgcttagcaaagaaaagtgtcaaaagcctcccaggtttaataaccattatagcagttagtgctggttttgggctactgttttcacttcttggtgttgccaaaatcacaaataaaatcaaacaacgcagagccaagaagttgagacggaagtttttcaagaagaatcatggactgcttcttcaacaattaatatcttcaaacaaggatatagctgaaaggatgaagattttcagtttagaagaattagaccaggcaaccaacaaatttgatcaaaatcgcattcttgggggcggtggccatggcacagtctacaaaggtatattatctgaccaacgtgtggtggccatcaaaaagtcaaaaattgtggttcaaagggagattgatgatttcataaatgaggttgtcatactttcacaaactaaccataggaatgtggtgaagctatatggttgttgccttgagacagaagttcctttattagtttatgagtttatatcgaatggaactctttcatttcatcttcatggccaaaatgagaatcctttgaagtggaaagatagattgagaatcgcactagaaactgcaagggctattgcatatcttcactcggcagcttctatatcagtgttacatagagatatcaaatctacaaatatactactcactgatactatgacggctaaagtatcggactttggagcttcaaggtcaatttcaattgacgagacaggaatactcaccatcatccagggcacttatggttatctagatcctgaatattattactctagtcgactgactgagaaaagcgatatttatagtttcggtgtcatcctagctgaactattgacaagggtaacaccggttttctcctccgaaacatcagaaaggacaagcctggcatcatactttgtgtcgttcataagagacaaccgcttgtcagatattctggactctcaaattgttaatgaggtgggtgctgaagatgctaaggtggttgctaagcttgcagaagcatgtttaagattaaaaggtgaggaaaggcctacaatgaggcaagtggagacaacacttgaagatgtgcaaaggtcaaaagtccaacttaatcatcagattgcaagagtgagcaatagtaatacactaaaaaatcagacgtacgagggaagtaagtgctatgaaggaactagacaatatagcttggaaaaggagttcattcaatcatctgaatttccaagataa

SEQ ID NO: 120 - protein, 783 aa, Oryza sativa
MARQGFRPRFPVQTHTTNPHDGLIRLNKFVSRFSATIGAVVFQLLVTTTTLSAAAPTPIALPGCPESCGGIQVPYPFGIGDGCSYHGFNLTCDDEAHHHQTPPKLFMATDNGTVVQVLNISLPDGTVRVRSKLSQSSIAGSSSSSSNASSSRSDLPADGPFTVSSAYNWLVAFGCNIVADLTPYGNIADGSSCAATCIDGWQNFAGPSCSGIARCRTSVGRGVHSYTIQVTSLIDRNSMGASTSTTWAAAFVAEQGWFSANENAMLYNFTNWLPFTVESVPVVLEWWLDLIRDGAILPLSVGPNTTDFRCLSLHSSSYYNDLNYDRRRCNCSQGYEGNPYIRDGCRDIDECQQPDVYPCHGTCINMPGTYRCLAKKSVKSLPGLITIIAVSAGFGLLFSLLGVAKITNKIKQRRAKKLRRKFFKKNHGLLLQQLISSNKDIAERMKIFSLEELDQATNKFDQNRILGGGGHGTVYKGILSDQRVVAIKKSKIVVQREIDDFINEVVILSQTNHRNVVKLYGCCLETEVPLLVYEFISNGTLSFHLHGQNENPLKWKDRLRIALETARAIAYLHSAASISVLHRDIKSTNILLTDTMTAKVSDFGASRSISIDETGILTIIQGTYGYLDPEYYYSSRLTEKSDIYSFGVILAELLTRVTPVFSSETSERTSLASYFVSFIRDNRLSDILDSQIVNEVGAEDAKVVAKLAEACLRLKGEERPTMRQVETTLEDVQRSKVQLNHQIARVSNSNTLKNQTYEGSKCYEGTRQYSLEKEFIQSSEFPR

SEQ ID NO: 121 - DNA, 2181 bp, Oryza sativa
atgacctccaatatcacacttgttttcttgttgatgatgtgcttggcagcggcagtagcagcagcagcaacccctggagtcgccggaggtaatgggctcttgcatacaatcccttccaaaaactctctggctcactgcccttctacctgcggcgacattggcttctcctacccatttgggatcggccatggctgcttccggcaaggtttcgagctcatctgcgacaacaccactcatcctcccacactgctcctggcaaacactacaactaaggtcatcggccaatcaggccggacactagaggtgatagaaatcccagccattgccttcaacatcgcgatgaacaacagcagcatcatcgactacatccgatactgggtttctcctgccaatggtttcaccatcgtgaacgagagcaccctgttcgttatcggatgtgggatcgaggcgtgcctgttcgatcttgacacgaacgagaccatgggttcttgcatcaccatgtgttctgacaatttggggatcatggagatgcacgatggggattgtaccggcatcggttgctgccatatcatcgtgagaagggagctgcgtcggttttggttaaagcttgatcatccggatgatagaacaacaccgcgatcatatcgggtgttgtctcgtgctcaggttttcatcctgccaacaattaacagctatcaattcaatacgaatgatcttgtttcgtccagctggatgaacacgagctccattggtggtactcttctccgtggtgccatcatggaccaggagacttgtccaggtgcatcagcgagcaaagcaacctatgcttgcaccactaacaccaattgcttcaatgctacaaatggaggatattactgttcctgccgcaatgatgtcaccgatggcaatccttacgttaaccttggctgcagtgacgaccctggtataacaattggaattgggtgtggccttggctcaatcattcttgcactcggtgcaatagtactaatcaacaagtggaagagaggtgtacaaaagagaattcgaagggcacacttcaagaaaaaccaaggcctactcttggaacaattgatattagatgaaaaagcacaagataaaacaaagatattctccttggaggaactagagaaggcaacgaactactttgatgctactcgtgtacttggctctggagggcatggcacagtttacaaagggattttgtccaatcaatgcatagtagccattaaaatgtccaaaatagcggagcaaacagagatagatcaatttatcaatgaagttgctatattatcgcaaatcattcatcgcaatgtggtaaagctttttgggtgttgtcttgaagcagaggtgcctttattggtgtatgagttcatatccaatgggacactatatgatattcttcacagtgatgtaagtgttaaatgcttgctatcatgggatgaccgtattaggattgcagtagaagccgcaggagctcttgcttacctacactcagctgcagcaattccaatttaccatagagatgtcaaatcttctaatatattgttggacgacaactttactacaaaggtttctgactttggagcttcaagaaccatgtcacttgatcaaactcatgttatgacaaatgtacaaggcacatttggttacttagatccagagtactactacactggccaactaacagcgaagagtgatgtctatagttttggagttatacttgtcgagcttctagtaagaaagaagtcgatttttataaatgaccaaggtacaaaacaaagcttggctcattactttgtggaagggcatcaacaaggagtagtcatggagatcttggattcgcaagttatggaagaggcaaaccgggaagaaattgatgaaattgtctcaattgcagaatcatgcttgaaaacaaaaggagaagagagacctaccatgaaagaagtagaaatgaggttgcagtttgttagaactataagacaaagaaagtgccaacaatttccagtaacagaaggagaaattgagcatttcccattcccaaatactagtaactcttcagatggcaggttcagccattctactggtttaacttgcgactctgtctctggaagttacagcttggagcaacaattttcttcatcaatcaatttgccacgataa

SEQ ID NO: 122 - protein, 726 aa, Oryza sativa
MTSNITLVFLLMMCLAAAVAAAATPGVAGGNGLLHTIPSKNSLAHCPSTCGDIGFSYPFGIGHGCFRQGFELICDNTTHPPTLLLANTTTKVIGQSGRTLEVIEIPAIAFNIAMNNSSIIDYIRYWVSPANGFTIVNESTLFVIGCGIEACLFDLDTNETMGSCITMCSDNLGIMEMHDGDCTGIGCCHIIVRRELRRFWLKLDHPDDRTTPRSYRVLSRAQVFILPTINSYQFNTNDLVSSSWMNTSSIGGTLLRGAIMDQETCPGASASKATYACTTNTNCFNATNGGYYCSCRNDVTDGNPYVNLGCSDDPGITIGIGCGLGSIILALGAIVLINKWKRGVQKRIRRAHFKKNQGLLLEQLILDEKAQDKTKIFSLEELEKATNYFDATRVLGSGGHGTVYKGILSNQCIVAIKMSKIAEQTEIDQFINEVAILSQIIHRNVVKLFGCCLEAEVPLLVYEFISNGTLYDILHSDVSVKCLLSWDDRIRIAVEAAGALAYLHSAAAIPIYHRDVKSSNILLDDNFTTKVSDFGASRTMSLDQTHVMTNVQGTFGYLDPEYYYTGQLTAKSDVYSFGVILVELLVRKKSIFINDQGTKQSLAHYFVEGHQQGVVMEILDSQVMEEANREEIDEIVSIAESCLKTKGEERPTMKEVEMRLQFVRTIRQRKCQQFPVTEGEIEHFPFPNTSNSSDGRFSHSTGLTCDSVSGSYSLEQQFSSSINLPR

SEQ ID NO: 123 - DNA, 1470 bp, Oryza sativa
atgctcaccaagggcggcgacggcgagactgcaacggggaagccggcggcgggctcctcggggaggcaacggtggtccggtggcgtaccacggcgcgaggcggcggacggtgaccgggacgaccggggcgcggagagggcgatttcagtggttcccggaggcgaggaagcggtggccggggtgtggctcggagttgccgatccgagggaggaaacggcgcagtccggcgtcgaccggggaggcggggcgacacagatggagacggcaaacacggcggcgatctcggggcttgttacctgtgtatttgttggtctatttggtttccttggatgggaggtgatccggcacagacagaacacaaaaaaacaagctctattaagacagacagatgaattttttcaacaacatggaggtcagctactgctagaaatgatgaaggtagagggcaatgttgggtttaccctctatgagagagggcagatcgaaactgcaacaaataacttcaacaaggcacacattgtcggggagggaggacagggaacagtttacagggcagagatagatggcactattgttgcgataaaaaggtgcaaggagattgatgagagcaggaagatggactttgtacaggagctggtcatactttgtcgtgtcaaccaccctaacattgtcaagctacttggttgttgcctacaatttgaggcacccatgcttgtctatgagtttgtgcaaaatagaacacttcatgagctattggacttccaaaggaacaggagttgccatgtcactttgggaacccgcctgaggattgccgccgagtctgccgatgcgcttgcgcatctccattcgttaccacacccgatactccatggtgatgtgaaaccagcgaacatactactcaccgaagaattggttgcaaaggtgtctgactttggctgctcaacaattgatgagaaaactcaggttgcgcccaagggcacacctggatatcttgacccagactacctgcttgagtatcagctcacagctaagaatgatctgtatagctttggagtaattctggttgaacttctaactggtaagaggccactatcaaaagaaaggaagaccttgacctcaatgtttaaggaggctatgacggatggcacactcattaaactccttgatagtgacattgttaatgaagacaacctgagagtgatccatcaggctgcagtgctagcgagtcagtgcttgattattccaggtacggcaaggccagagatgaggtatgtggcagagcagcttcagcaacttgcatttgcagatgaagtgcagcaagatccacagccaccgcttgtgcttgcgggtcttaggtttacggcagagatggcaaatacacgtacaacatcctcatggcaaactgatagcaagactaccggggtttacagcctcgagaagaatgttagactttgctctaggatcacctag

SEQ ID NO: 124 - protein, 489 aa, Oryza sativa
MLTKGGDGETATGKPAAGSSGRQRWSGGVPRREAADGDRDDRGAERAISVVPGGEEAVAGVWLGVADPREETAQSGVDRGGGATQMETANTAAISGLVTCVFVGLFGFLGWEVIRHRQNTKKQALLRQTDEFFQQHGGQLLLEMMKVEGNVGFTLYERGQIETATNNFNKAHIVGEGGQGTVYRAEIDGTIVAIKRCKEIDESRKMDFVQELVILCRVNHPNIVKLLGCCLQFEAPMLVYEFVQNRTLHELLDFQRNRSCHVTLGTRLRIAAESADALAHLHSLPHPILHGDVKPANILLTEELVAKVSDFGCSTIDEKTQVAPKGTPGYLDPDYLLEYQLTAKNDLYSFGVILVELLTGKRPLSKERKTLTSMFKEAMTDGTLIKLLDSDIVNEDNLRVIHQAAVLASQCLIIPGTARPEMRYVAEQLQQLAFADEVQQDPQPPLVLAGLRFTAEMANTRTTSSWQTDSKTTGVYSLEKNVRLCSRIT

SEQ ID NO: 125 - DNA, 849 bp, Oryza sativa
atgggggagggaaggagaggagttagaggagaggaggaggaagaggaagagtgggatgaagagataagctgctctacggcatgtggcgacgtgaagatctcgtatcctttcgggttcgaggccggctgctcgtggcctggcttcgagctcatctgccgtgacaccatcaagggcaagaagcccttcctgccaccggtcacggagagcgttggatacttggagctggagagcatctctctgctcgatgcgacacggtctacctccccggccgaggcatacaggctctccgacaccgagaataagttcataatcgttgggtgctacacggtggcgtacatcacagttggagacagggaggacatgcggtacgccagcgcgtgctcggcgttttgcgggccgaaaggcaataacttgacgagcctaatggatggcgcctgctccggcacaggctgctgcgaggccaccatcaccgagggacacacctcctacaatacgatgtttgatccggactacaacacgacgcagatctacaatgttagcagctgcagctatgcggtgctgatggagtcatcaagatttagctttcggaggagctacgtgatgaattcatcgcagttcatcgataccaacggcgggcgggtgccaatggtcgttgactgggctgtgcagaacgcgagcaattgcgtggaagcgcagaaagatcatgactcctacgcgtgcatcagcagcaacagcgtgtgcgtcaactcgtccagcggacccggctacatctgcaactgtactcatggataccaaggaaacccttacctattacacggctgccaaggtgaatatgttaaatttctatag

SEQ ID NO: 126 - protein, 282 aa, Oryza sativa
MGEGRRGVRGEEEEEEEWDEEISCSTACGDVKISYPFGFEAGCSWPGFELICRDTIKGKKPFLPPVTESVGYLELESISLLDATRSTSPAEAYRLSDTENKFIIVGCYTVAYITVGDREDMRYASACSAFCGPKGNNLTSLMDGACSGTGCCEATITEGHTSYNTMFDPDYNTTQIYNVSSCSYAVLMESSRFSFRRSYVMNSSQFIDTNGGRVPMVVDWAVQNASNCVEAQKDHDSYACISSNSVCVNSSSGPGYICNCTHGYQGNPYLLHGCQGEYVKFL

SEQ ID NO: 127 - DNA, 1485 bp, Oryza sativa
atgaagaaggcttacctggacaactgcatgacctatgcaaaaatgagggtcacttggcgctgcagcaagaagctagtaaaaaggtcactggagtctggcagattgaaaataagattggagcggaacaacacattcagcaaagaaagctgtagatactgcatcatcaatcacccttctttacatgtgaaagagctggcgagtaagagctttcagaaacctgcacagtcagatcatcaaaagatcaaggattatttgaagtggtacctatgcagcacgaatgcaaatgtagacctcatacaggaatttgtgccactcttttggttgctttaacgagtttgcttgggatagaatggatcaaatacaaacaacgaattaaaaggcatgacctcatgagaaagaggggtgagtattttaatctacacggaggccaattgttgacagatatgatgaacatagagaacaacatttcatttaagttgtatgaccgagatgaaattgagttggccacaaaaggctttgacaagatgtcaatcatcggtgaaggaggtcagggtactgtttttaaagggtataatctcgatcaagtgaacaaccctgttgcaattaagatgtgcaagggatttgatgagaatagtaggacagaattcacgcaagagttgctcatactttctcgagtcaaccatgaaaacatcgtgaagctaattggctgttgtctgcagtttgaagttccagtgcttgtgtatgaatttgtcccgaataagactttgcactatctaattcacagccaaaatgatccatccatcagaacactagagatccgcctaaaagtcgctgccgaatctgcggaagcattttcatatctacactcactggaccaccctatcttacatggggatgtgaagtcggatgaacatactacttagtaacaattttattgcaaagatttctgattttgggtgctccaaaattagggcagctgatggacacgatgacgtggtgaaaggtaccattggctatctagatccagagtacctgctgaagtttgagctcactgataagagtgatgtgtatagctttggtgtcatccttcttgagcttttaactcgtcgaacaccattatctaagcagaaggtcagcctcgcatcagtatttcaagaggccatgaaggaaggcctatttcttgagctcatagacacggaaatattacatgaggataacatgggattgataggtgatctagcaaggctggcatgccagtgcttagcaatgactagtgagagcagaccaacaatgagcaggattgcagaggaattgcgacgaatagaaaaacaagtacgacaacaccgtggggtacttacaagtattagttcattgtcattgtcagcaagttcatctgcagacacatcagagcatttcacaggtgaaaccaatggttacgacagccttaggagggtggctgcaatgagcatagaatttgctagatga

SEQ ID NO: 128 - protein, 218 aa, Oryza sativa
MQHECKCRPHTGICATLLVALTSLLGIEWIKYKQRIKRHDLMRKRGEYFNLHGGQLLTDMMNIENNISFKLYDRDEIELATKGFDKMSIIGEGGQGTVFKGYNLDQVNNPVAIKMCKGFDENSRTEFTQELLILSRVNHENIVKLIGCCLQFEVPVLVYEFVPNKTLHYLIHSQNDPSIRTLEIRLKVAAESAEAFSYLHSLDHPILHGDVKSDEHTT

SEQ ID NO: 129 - DNA, 2622 bp, Oryza sativa
gagagaggtagccaaataaaaagtagtagttcatccatgcacccatgcctccccacagaaatgcagctatccgcggcgcagtcgatggacatatttgcctactaatagtgctatttctcatcagcataaagctcgcggcgggcgggccaatcgcccgatcatgccaggactccgtctgcggcggcgtacgcatcccatacccgttcggcatcagctcaagcggctgcgctatggcgcctagcttcgaagtcgactgcaacaatacggcgaacggttttaagccgttcgttggaaatgtcgaagtcatatccctcagcaatggtcaggcccgggtaatgaatcacgtatcttcttcctgctacaaccgcacgtcccgacagatgaaccctgcggacgtgtggtatctgaacctcacgggcacgccctacaggctctccgactcggccaacaagttcacggtcatcgggtgccggacgctggcctacaccttcgacgattacaacgtgggcaagtacatgagcgggtgcgtgtccgtctgccggcgaggtgacttgagcagcgccatcaacggcagctgcgtcgggataggctgctgccagacaaacatctcaacgggcctaagctattacgaggtcatgttcgactacaccctgaacacatccgggatctacaaccgcaccccctgtagctacgcggtgctcatggaatcgtctagcttcaccttctcaaccacctacctaacttcacgggcgttcaacacctcctatggtggccaggctccgctggtgcttgattgggctatccggactgctaacaactgcgtggaagcacaaaaaaatcctgcgtcgtacgcgtgcaaaggtgactatagcgtctgcctcaactccaccaacggaccaggatacatatgtaactgcaaaaagggataccaaggcaatccctaccttcaagattccaacggctgtcaagatattaatgaatgccaagattctaataattacccttgtcacggagaatgccataacaaacctggcgattttgattgtttctgccgtgcgggtagccgtggaaatgcaactattcctggaggatgtcggaaggacttcttacctctaaaagcacagctggcaattggaattgctgcatgtgtgttggctggcctgtttgctttccttggatgggaagtgattcggcacaaaaggagcattagaaaacaagctttgttaagacagactgatgagttttttcaacaacatggaggccaactattgctagaaatgatgaaagcagaaggcaatatcgggttcacactctacaagagagtggagatagagaccgcaacaaaaaacttcaacaaggcacaaatcatcggtgaaggagggcaaggaacagtctacaaggcagtcttagatggaactgttgtcgcgataaaaaagtgcaaggagattgacgagagtaggaagatggacttcatgcaagagttggtcatactttgtcgtgtcaaccatcctaacattgtcaagttgctcggctgctgcctacagtttgaggcgcctatgcttgtctatgaattcgtggaaaataaaacattacaggagctgcttgacctccagagaagcaagaggttccatgtcacgctgggaacccgcctaaggatagctgccgaatcagctgatgcacttgggcatctccactcactaccacacccaatactccatggtgatgtaaagccagccaacatccttcttgctgaaggattggtagcaaaggtgtctgactttgggtgttcaactattgatgagaaaacacaatctatgcttaaaggcacacctgggtatattgacccagagtacctgcttgagtatcagctcacagccaagaatgatgtctacagttttggtgtcattcttcttgagcttctaacaagtaagaggccattgtcaaaagaaagtaagacattggcgtcaatgtttcaggaggctatgatggatggaacattccatgagcttcttgatagcgaaataatagatgaagcaagcatgggagtcctacatcagattgcggttctggcgattcaatgcttggctcttcctggaatgtcaaggccggtgatggagcaagtcgcaaaggagcttcgtcgattagcactatcagatgaagtgcagcaatgcccacagccgcctctggttctcgagggtctcaactttgcagtgatgggtagcatgtgtacaacttccttgttgtacaccgagggcaatagcaccggagtttatgatcttgagaagaaaaccgtgatgagcacagaatttgccagatgatcgattgtgtgtgtgctatattgattgctttactttgtatgcttgtacgcttgtgttaggtttgagtgttcttcaatacttatggaggtggaagatctagctccaacattagtcataaggacaaagatcctgcaagacaataatgtaatgctataagtaggtacttcaaacattattagaagtgttgtaataaaactaataatgacagctatctatatatgtgaaagtagtgtttattagatgtgttgtaaaagattcttgaatatgttggtgtgggtttagtgtctgatttatcgattgctct

SEQ ID NO: 130 - protein, 757 aa, Oryza sativa
MPPHRNAAIRGAVDGHICLLIVLFLISIKLAAGGPIARSCQDSVCGGVRIPYPFGISSSGCAMAPSFEVDCNNTANGFKPFVGNVEVISLSNGQARVMNHVSSSCYNRTSRQMNPADVWYLNLTGTPYRLSDSANKFTVIGCRTLAYTFDDYNVGKYMSGCVSVCRRGDLSSAINGSCVGIGCCQTNISTGLSYYEVMFDYTLNTSGIYNRTPCSYAVLMESSSFTFSTTYLTSRAFNTSYGGQAPLVLDWAIRTANNCVEAQKNPASYACKGDYSVCLNSTNGPGYICNCKKGYQGNPYLQDSNGCQDINECQDSNNYPCHGECHNKPGDFDCFCRAGSRGNATIPGGCRKDFLPLKAQLAIGIAACVLAGLFAFLGWEVIRHKRSIRKQALLRQTDEFFQQHGGQLLLEMMKAEGNIGFTLYKRVEIETATKNFNKAQIIGEGGQGTVYKAVLDGTVVAIKKCKEIDESRKMDFMQELVILCRVNHPNIVKLLGCCLQFEAPMLVYEFVENKTLQELLDLQRSKRFHVTLGTRLRIAAESADALGHLHSLPHPILHGDVKPANILLAEGLVAKVSDFGCSTIDEKTQSMLKGTPGYIDPEYLLEYQLTAKNDVYSFGVILLELLTSKRPLSKESKTLASMFQEAMMDGTFHELLDSEIIDEASMGVLHQIAVLAIQCLALPGMSRPVMEQVAKELRRLALSDEVQQCPQPPLVLEGLNFAVMGSMCTTSLLYTEGNSTGVYDLEKKTVMSTEFAR

SEQ ID NO: 131 - DNA, 2535 bp, Oryza sativa
atggggcgaggcgtgcgtcagatcgcctgtcgccacctaacccgcgatctgaccggccatccgatgggagccttagtacttgtggcaaccagcctgatgctgctgatactacagcatagtggtgcatctgacggggctagggctgggtctggaagtatctggcagccccagcccgattgtccagctccagcgaagtgcggcaacgtcaacattccctacccgtttggcataagagaaggttgcttccgaccgaagggcggctttaatatctcatgcaagcaagaacaagcttatattggaccggacattagggtcacgaattttgatgtagtccagagtgaggctcgcatcctgaccgatataccatcagggacggtagcatggaagtacaacaatgaatttgatccaattgcatggacgtccagaggaggattacgacttggtaatcaccatatggtttccagcgccaagaacagattcacagcaatcgggtgttcaactgttgcattcatctacggcagagacaaaaatggtagcaatggacagtttgatcagttcaccagcttatgtggatcgttctgcttcgacgagggtagcatcgaagacggcccagagtgctccggcatgggttgttgccaagtccccatttcaaccaaccttaggaggttcagtttaggattctataattataacacaaccaaaaaagttcttaattttagttcacgcagctatgcgttcgtggtcgagaaggatcaattcaagttcaagagttcctatgccaaagcagacaatttcatggaggagctcgctcgtgggattcctataattctccagtggattgctggtaatgaaacctgcaaggaagcagccctgaaggagtcgtatgcttgcgttgccaataacagcaaatgcatcgatgtgatagaggcgcccgggtacagatgcaactgcacccaaggttacgagggaaatccctacctcaaagacggctgccgagttgttaatattgcagacatcaatgagtgcaacgccacaagattcccgaattcttgcaagggcatctgcactaacaccgatgggagctacgactgtatttgcatcagcatcatcttcctcatcatctgtatctccactctgctgatcaagattcagagaatgaagctggaaaaagagaagcagaggttctacgatcagaacggtggccacatattataccagaaaattatctcagggcaagtcaatacagtggaaatattcacagaagaggtactaaagaatgcgaccaacaacttcgacagcggacaaaagcttggcgccggtggtcatggcattgtctacaagggcattctcagggacaacaatgtcgtcgccgtgaagcgctccaacttcctccacgtgacagacgccgaggaattcgtgcaggagatcatcatgctctcgcagatcaaccaccggaacgtggtcaggctcatcggctgctgcctggaagttgaagtgcccatactggtctacgagttcatctccaatggcactctctcctacctgatccatggcgatagcaggcggtatgcttcactgaaacttcgtcttaggattgctcaagaatcagctgaagcattggcatacctgcacctgtcgacgaaccggcctatcatccatggcgacgtggagtctctgaacattatgctcgatgatagctacacggtgaaggtgaccgacttcggggcatcacggtggctgtccaatgaagctgtcgagcaaattgcgatggtgcagggaacccgagggtacctggatccggagtacctgcaggagaggaagctgacggagaagagcgacgtgtacagcttcggcgtcgtgctgctggagctgatcactgggaagaaggcgatctaccgccacgatggcgatggcgacttcgagagcctcgcaggatcgttcctgcgggcgatggaggagagggtggagaacatcttggacacaagcttggctggtgccagcatggaggcgctgcccctgctccaggaggtcgccaaggtggggagtatgtgtctgagcgccaaggggaaggagaggccatccatggcggaggtgaccgacatgttgaaagctgtaagaattgcgtggagggatcttctggtttcatcggagtacaacgtgacggaggttttcgtcgacagttcagaagctcctccatctggcaacccatcttccgctgtgttctggacgccggacatgcagtctctagaagttgaaactttgaggtgatgtttacagtctagactgtttgcagatattcagagttgcattgtctgcagacgagttgcaaaggtgtttgttcttgttataaactattcctatgtggttttcgtgactgttctagctgtcaattctcaggtttgctatctcaaaatggctattacttagctttgccagcaatgattttagtagtctcaagtgtaacagtagagtaaagcatacattgatatctttcaaacaggtttcagatggcataaagtattcagaatatgatat

SEQ ID NO: 132 - protein, 755 aa, Oryza sativa
MGRGVRQIACRHLTRDLTGHPMGALVLVATSLMLLILQHSGASDGARAGSGSIWQPQPDCPAPAKCGNVNIPYPFGIREGCFRPKGGFNISCKQEQAYIGPDIRVTNFDVVQSEARILTDIPSGTVAWKYNNEFDPIAWTSRGGLRLGNHHMVSSAKNRFTAIGCSTVAFIYGRDKNGSNGQFDQFTSLCGSFCFDEGSIEDGPECSGMGCCQVPISTNLRRFSLGFYNYNTTKKVLNFSSRSYAFVVEKDQFKFKSSYAKADNFMEELARGIPIILQWIAGNETCKEAALKESYACVANNSKCIDVIEAPGYRCNCTQGYEGNPYLKDGCRVVNIADINECNATRFPNSCKGICTNTDGSYDCICISIIFLIICISTLLIKIQRMKLEKEKQRFYDQNGGHILYQKIISGQVNTVEIFTEEVLKNATNNFDSGQKLGAGGHGIVYKGILRDNNVVAVKRSNFLHVTDAEEFVQEIIMLSQINHRNVVRLIGCCLEVEVPILVYEFISNGTLSYLIHGDSRRYASLKLRLRIAQESAEALAYLHLSTNRPIIHGDVESLNIMLDDSYTVKVTDFGASRWLSNEAVEQIAMVQGTRGYLDPEYLQERKLTEKSDVYSFGVVLLELITGKKAIYRHDGDGDFESLAGSFLRAMEERVENILDTSLAGASMEALPLLQEVAKVGSMCLSAKGKERPSMAEVTDMLKAVRIAWRDLLVSSEYNVTEVFVDSSEAPPSGNPSSAVFWTPDMQSLEVETLR

SEQ ID NO: 133 - DNA, 291 bp, Oryza sativa
atggccttcaaccttgaagggcctgaaaatgagaggagcctttccttgagcttcttgtgtgccatggaggagggaagactcatggacattataggtcatcacattcaaactgatgagaatgctggggtgctcgaggaggttgccaaccttgcaagccggtgcctggagatgatcggcaataaccgcccgtcgatgagagatgtcgctgacaaatttggccggctgaggaaggtcatgcagcacccatgggcgcagcatgacccggaggagatggtgcaacattcaaaatag

SEQ ID NO: 134 - protein, 96 aa, Oryza sativa
MAFNLEGPENERSLSLSFLCAMEEGRLMDIIGHHIQTDENAGVLEEVANLASRCLEMIGNNRPSMRDVADKFGRLRKVMQHPWAQHDPEEMVQHSK

SEQ ID NO: 135 - DNA, 2253 bp, Oryza sativa
atggactgctactacaagctcccagttgaaaaactagcaatgcgtctgctgctgttcataggcctcgtgatctccctacagttcatggcagacggcgcatcattgccggacgataggtgcctaaagaagtgtggtgatgttgacattctatacccatttgggattggcgaaggctgtgccattgaaggctttgtgcttagctgcagcaagacagaggatggacgtggggatgtggcattatatggcaccacgccggtgctgaatatatcgctgcgctatggtcaggttcggatgaaatcaacgtacatatcctcgatgtgctacaacctctcaaccaagaatatggactacaagaactggctcctgaacctcacaacctctccgttcaccatctcgcagaaggagaacatattcatagtcatcggtgccaacacggccgcaaacatgtttggttacagccgctactctaccatgctaaatatgatcgggtgcttgtctcagtgctcaccgtataatagcttcacagctcaagatgggtcgtgtgtcggcatcggctgctgccaggccgtactcagcaacaacatttcctaccacgaagtgcaattcaaccccttatacaacaccacaacgtcttacaacaacagaagcatcacggacagggcaagctactgtggctacgctgtggtgatggaggctgctgcattcaggttccgaacagcatacctgaactcaacggccttttgggacgagcacaatggcagtgtcccggtggtcttgaactgggttgtgggtaatgagacatgtcaggttgccaagcaaatgggagatagatacgcatgccgtagcaaaaacagcatgtgcatcgattcatccagtggccctacaggttacctctgcaactgcactgaaggctaccgtggcaatccgtaccttcccgatggatgccaagatattaatgaatgtgatgttaacaatccacctccatgccctggccgttgcaagaacatacctggcagttttacttgttcaagcccctcacaatccagaacggtgatactagctgttagcctaagtgttggaattgttgccatggcaatgatcgtcacctgctcatacttggtccgtgaacggaagaaactggccaatatcaagaagaagtatttccaacagcacggtggcatgcttctgctgcaggagataggcttaaagcaagggcagagcactgccttcacaatcttcactgaagcagaactcatagaagcgacgaacaagttcgaggacaagaacgtccttggccgcggtggccatggcactgtctacaggggcatgctcaaggacagccgtctgattgccatcaaacgatgcatgtcgatgattgacgacaggcaaaagaaggagtttggcaaggagatgctcatcctgtcccagatcaaccacaagaacatcgtcaagctcctgggctgctgcctcgaagtggaggtcccaatgctagtctatgagtttatccccaatgggaccttgtttcacttcattcatggcggcaatgactgccgcaacatccccttttctactcgagtgcgaattgcccatgaatcagcccaagcactagattaccttcattcatcagcatcgcctccaatcattcacggtgatgtcaagacctccaacatactactggacgagaactataccgcaaagatatcggactttggagcctcaatactagtgccgactgatgaggcccagtttgtcaccttggtgcaaggaacctgtgggtacctagatcccgagtacatgcagacgtgccaattgacagataagagcgatgtgtacagctttggcgtcgttctactggagctgctcaccggcaaaatggccttcaaccttgaaggtcctgaaaatgagaagagcctttcattgagcttcttgtgtgccatgaaggagggaagactcatggacattatagatcatcacattcagactgatgagaatgctggggtgctcgaggaggttgctgacctcgcgagccagtgcctggagatgatcggcgataaccgaccgtcgatgagagatgtcgccgacaagcttggccggctgaggaaggtcatgcagcacccatgggcgcagcatgacccggaggagatggagagcttactcggggagtcgtcggtggctggtttggagatggttagcaccgggaatttcagcatggagggtggagctgtgcaaggcattctggagtctgggcgttga

SEQ ID NO: 136 - protein, 750 aa, Oryza sativa
MDCYYKLPVEKLAMRLLLFIGLVISLQFMADGASLPDDRCLKKCGDVDILYPFGIGEGCAIEGFVLSCSKTEDGRGDVALYGTTPVLNISLRYGQVRMKSTYISSMCYNLSTKNMDYKNWLLNLTTSPFTISQKENIFIVIGANTAANMFGYSRYSTMLNMIGCLSQCSPYNSFTAQDGSCVGIGCCQAVLSNNISYHEVQFNPLYNTTTSYNNRSITDRASYCGYAVVMEAAAFRFRTAYLNSTAFWDEHNGSVPVVLNWVVGNETCQVAKQMGDRYACRSKNSMCIDSSSGPTGYLCNCTEGYRGNPYLPDGCQDINECDVNNPPPCPGRCKNIPGSFTCSSPSQSRTVILAVSLSVGIVAMAMIVTCSYLVRERKKLANIKKKYFQQHGGMLLLQEIGLKQGQSTAFTIFTEAELIEATNKFEDKNVLGRGGHGTVYRGMLKDSRLIAIKRCMSMIDDRQKKEFGKEMLILSQINHKNIVKLLGCCLEVEVPMLVYEFIPNGTLFHFIHGGNDCRNIPFSTRVRIAHESAQALDYLHSSASPPIIHGDVKTSNILLDENYTAKISDFGASILVPTDEAQFVTLVQGTCGYLDPEYMQTCQLTDKSDVYSFGVVLLELLTGKMAFNLEGPENEKSLSLSFLCAMKEGRLMDIIDHHIQTDENAGVLEEVADLASQCLEMIGDNRPSMRDVADKLGRLRKVMQHPWAQHDPEEMESLLGESSVAGLEMVSTGNFSMEGGAVQGILESGR

SEQ ID NO: 137 - DNA, 2223 bp, Oryza sativa
atggccatgccgctcttcctcggcctagctgtgcttactctgctgctcgcgacggcagcggcggcgctgccgccgccggggtgcccgaggacatgcggcggcgtcgccgtcgagtacccgttcggcatcgggccaaactgctcgctgtccgacggcttcagcctcgactgcgtccgcgacaccccgcagctccgcctcggccccgtgaagcagcagcagacggtgagggtgctcggcgtcgacctgctccacggcaagatccggacgacgaacgccatcgcgtcgcagtgcctggacgcgcgcacgggcaagctggtcaacacctcgtgggaggggctcaacgcggcggcgctgccgtaccgcttctccgacgaggacaaccggttcttcgccgtcggctgcagcggggtcgtcctcctgcaaggcacggcggccggagccgacgaccgggtggtgatcggctgcatctcgacatgcttcggcaacgcgagcatcaggaccggctcctgctccaacatcgggtgctgcgagacggccatccccaaggggctcaactcctacctgctcgccatggaaaggatgcccggcggctcgccggtgaaccgctgcttctacgccacgctgatggaggcggccagcttcagcttcgaggcggcggacgcggcggcggacgggttctaccggaagagcagcaacggcacggttcccgtggtgctcagcttcgtggtgggcagcgagacgtgcaaggaggctcagacgagcgacacctacgcgtgcctcagcgatcacagcgtctgcgtcgacggtgccccaggctacgtgtgcaactgctcgcaggggtacaccggtaacccctacctccccaacggatgcgtagatatcgatgaatgcggtccaggaaaacatggatgtccggatggaatgatttgcacaaacttccccggcggatacaattgctcgtgtccggaaggggagtacaagagcaacaaaaatggagtattgatctgcgagtcagaccagaaacggtcttccctcccggtctccgtgatcatagttatcggcgttagcggtggcgtcgtcatcgccgtgatagccatcttgatcacatacctgatgcgccagcggcgagcgctcgccgacgtcaagcgcaagtacttcgagcggcacggcggcctgcttctctacgacgagctgagcacaaggccgggcaacaccttcaccatctacatggaggagcagctcgagcaagcgaccaacggcttcgacgacggcaacatcctcggccgcggcggccacgccaccgtctacatgggcatcgtgcccgccggcggcgacggcctcgtcgtcgccatcaagcggtgcaaggtgatggacgagacgaacaagaaggagttcggcaaggagatgctgatcctctcccaggtcaaccacaagaacatcgtcaagctactcggctgctgcctcgaggtcgacgtccccatgctggtctacgagttcgtccccaatggcaccttgtaccacctcatccatggcggcggcggcggcggcggcgacggcggagtcatctcgttcgccactcgcctccggatcgcgcacgagtcggcggagtcgctcgcgtacctgcactcgttcgcgtcgccgccgatcctccacggcgacgtcaaatcctccaacatcctcctcgacgagagcttcatggcgaaggtgtccgacttcggcgcctccatcctggcgcccaccgacgaggcccagatggtgaccatggtgcaggggacgtgcggctacctcgacccggagtacatgcggacatgccagctcacggagaagagcgacgtgtacagcttcggcgtcgtgctgctcgagctcctcaccggcaagaagccgctctgcctcgacgggccggaggaggagcggagcttgtcggcgaggttcgtggcggccatgggggagaggaaggtgggcgagatgctggacgagcaggtgaagcgcgaggcgagcggcgagtcgctggaggagatcacgcggctggctctcgagtgcctgcagatgtgcggcgccgacaggccggcgatgaaggaggtcgccgagaggctgggtggactgcggaagctgcatcagcatccatggacgcaggacgccgtcgagctcgaggaggcgaggtgcttgctccacggctcgccggagtatcagctttcagctaggtacaccactggtagtagatag

SEQ ID NO: 138 - protein, 740 aa, Oryza sativa
MAMPLFLGLAVLTLLLATAAAALPPPGCPRTCGGVAVEYPFGIGPNCSLSDGFSLDCVRDTPQLRLGPVKQQQTVRVLGVDLLHGKIRTTNAIASQCLDARTGKLVNTSWEGLNAAALPYRFSDEDNRFFAVGCSGVVLLQGTAAGADDRVVIGCISTCFGNASIRTGSCSNIGCCETAIPKGLNSYLLAMERMPGGSPVNRCFYATLMEAASFSFEAADAAADGFYRKSSNGTVPVVLSFVVGSETCKEAQTSDTYACLSDHSVCVDGAPGYVCNCSQGYTGNPYLPNGCVDIDECGPGKHGCPDGMICTNFPGGYNCSCPEGEYKSNKNGVLICESDQKRSSLPVSVIIVIGVSGGVVIAVIAILITYLMRQRRALADVKRKYFERHGGLLLYDELSTRPGNTFTIYMEEQLEQATNGFDDGNILGRGGHATVYMGIVPAGGDGLVVAIKRCKVMDETNKKEFGKEMLILSQVNHKNIVKLLGCCLEVDVPMLVYEFVPNGTLYHLIHGGGGGGGDGGVISFATRLRIAHESAESLAYLHSFASPPILHGDVKSSNILLDESFMAKVSDFGASILAPTDEAQMVTMVQGTCGYLDPEYMRTCQLTEKSDVYSFGVVLLELLTGKKPLCLDGPEEERSLSARFVAAMGERKVGEMLDEQVKREASGESLEEITRLALECLQMCGADRPAMKEVAERLGGLRKLHQHPWTQDAVELEEARCLLHGSPEYQLSARYTTGSR

SEQ ID NO: 139 - DNA, 2289 bp, Oryza sativa
atgacgaagcatcatccaatgctgctcttccttggcctagctttgctcgccctgcagcctctgatcgcggccgcatcacggcggccgccgccgtcgccgctgtgtccgaagaagtgcggcaacgtcgacatcgagtacccgttcggcatcgggccaaactgctcgctgtccgacgatttcagcctcgagtgcgtccacgacaccccgcagcttcgcctcggcaccgatcggcagcaagtggtggtggccgtgctcgacatcaacctgctccacggcaagatccggattgccaacagcatctcctggcagtgcaaggacgagaacgacccaaccggcgccccgttgaagaacagctcgtggatgggcctcgacgtgacggagctgccgtaccgcttctcctacgaggacaaccaattcgtcaccgtcggctgcaacgtgctcgtcttgctatccggagaggaggcgtcagtcgacccgatcctgaacgtctgcatgtccacatgcttcggcaacgggagcaacatcaggaacggctactgctctggcgcgggatgctgcgagatggccatccccgtgggactcaaatcctaccggcttgaattcagcgggccattattatttaataacagctggtcgccggacaattacacctggtgcagccacgccgtgttgatggaggctaaaagcttcagcttcgagagggactacgcgacaaccgataagtttttcagaaacaagaacggcacggtccccgtcgtgctcaacttcgcggcgggcagcgagaagtgcaaggaagcaagaatgaaagatacctacgcgtgcgtcagcgaccacagcgcgtgcgtcggcacggctgatggctacgtgtgcaactgcacgagtgggtacaagggcaacccctacctccccggcggatgcacagatattgacgtatgtgctcctggaaatgacgggtgtccggacgggatgatttgcagtaattttcccggcggacacaactgctcgtgtccagaaggagagcacaagagcaacaagagtggagtactcatctgcgagccggacctgaaacgatctttgccggacctgaaatttaaacgatcttaccggctcccggtctcagcgatcatagctatcggcgtcaccggtggcatcgctatcatcgtgatgagcttcctgagctcatacctagtacaccagcgaagagcgcttgccgacatcaagcgcagctacttcaagcgacatggcggcctgcttctgtacgaggagctgaacgcgaggaagagcaacgcgttcaccatatacaccgaggagcagctcgagcaggcgaccaacggcttcgacgagagcaacgtcctcggccgcggcggccacggcaccgtgtacaagggctgggtggctgcagcctccgacgacctcgttgtcgccatcaagcggtgcaagctaatggacgagaggaacaagaaggaattcgggaaggagatgctgatcctctcccaggtcaaccacaagaacatcgtcaagctactcggctgctgcctcgaggtcgacgtccccatgttggtctacgagtacgtccccaatggcaccttgtaccagctcatccatggcggatctgccggcgccatctccttcgcttcccgtctccggatcgcccacgagtcggcggagtcactcgcgtacctgcactccttcgcgtcgccgccgatcctccatggcgatgtcaagtcctccaacatcctcctcgacgagagcatcatggccaaggtgtccgacttcggcgcctccatcttggctcccactgacgaagcccaaatgatgaccatggtgcaggggacgtgcggttacctcgacccagaatacatgcagacatgccagctcacggagaagagcgacgtgtacagcttcggcgttgtcctgctcgagctgctcaccggcaagaagccgctctgcctcgacgggccggatgaggggcggagcttgtcggcgaggttcttggccgccatgagggagaacagagccgatttgatactggatgagcaggtgaagagcgaggcgagcggtgagttgctggaggagatcacgctgctggctctggagtgcctgcagatgtgcggcggcgacaggccggcgatgaaggaggtcgccgagaggctgggcggactgcggaagctgcaccagcatccatggacgcaggacgtcgtcgagctcgacgaggtgcggtgtttgctcagcgactcgccggaaagtatcagttttgaagtggacgccaccagtagtagcggatactga

SEQ ID NO: 140 - protein, 762 aa, Oryza sativa
MTKHHPMLLFLGLALLALQPLIAAASRRPPPSPLCPKKCGNVDIEYPFGIGPNCSLSDDFSLECVHDTPQLRLGTDRQQVVVAVLDINLLHGKIRIANSISWQCKDENDPTGAPLKNSSWMGLDVTELPYRFSYEDNQFVTVGCNVLVLLSGEEASVDPILNVCMSTCFGNGSNIRNGYCSGAGCCEMAIPVGLKSYRLEFSGPLLFNNSWSPDNYTWCSHAVLMEAKSFSFERDYATTDKFFRNKNGTVPVVLNFAAGSEKCKEARMKDTYACVSDHSACVGTADGYVCNCTSGYKGNPYLPGGCTDIDVCAPGNDGCPDGMICSNFPGGHNCSCPEGEHKSNKSGVLICEPDLKRSLPDLKFKRSYRLPVSAIIAIGVTGGIAIIVMSFLSSYLVHQRRALADIKRSYFKRHGGLLLYEELNARKSNAFTIYTEEQLEQATNGFDESNVLGRGGHGTVYKGWVAAASDDLVVAIKRCKLMDERNKKEFGKEMLILSQVNHKNIVKLLGCCLEVDVPMLVYEYVPNGTLYQLIHGGSAGAISFASRLRIAHESAESLAYLHSFASPPILHGDVKSSNILLDESIMAKVSDFGASILAPTDEAQMMTMVQGTCGYLDPEYMQTCQLTEKSDVYSFGVVLLELLTGKKPLCLDGPDEGRSLSARFLAAMRENRADLILDEQVKSEASGELLEEITLLALECLQMCGGDRPAMKEVAERLGGLRKLHQHPWTQDVVELDEVRCLLSDSPESISFEVDATSSSGY

SEQ ID NO: 141 - DNA, 1149 bp, Oryza sativa
atgtatgacgataggaaggatttcaataggatcgacggcgagttcgaagtcgtgcccgtcgtgctcgacgggacgatccggaacgtctacaactacgcgtgccggagctcgcgacgtacaccagcgacggccaggggtaccggtgcaattgctccaagggctacgagagcaaccccctacctcgacgacggatgcacagatatcaacgagtgcttacacccgaaagaatacggatgctatggaaactgcatgaacacaccaggaggctacacttgcgtgtgccctcctgggactagtggaaatccgaccgaaatgaatggttgccactcaaaggacaagttcacctttgttgtcaaaaaaaggaagctcatcagaacgaagcagaaattctttgagcagaatgttggagtgatcctgcagcagcagatgcattccggtggaggtgcccgtgggttcaggatattctctatggaagagctcaagaaggcgaccaacattttcgctgccggccatgttctgggccgtggtggtcatggtgttgtctacaagggtgtccttgaagacaagacaatagtagcaatcaagaagtcaaagatgatgaaggaggcccagaccaaggaatcaaccatcggaatgtcgtcaagctccttggttgctgccttgaagttgaagtgcccatgttggtctacaaattcgtctcaaataacaccctctaccactacatccatgggaagaacccccaaagctgacataccacttgatattcgtcttcaaatagctgcagagtctgccgaggcgctctcctacatgcactcatctgcttcaccgccaaccctccatggagatgtcaagatggcaaatatcctgcttgatgacaagctcagcgccaaagtttctgattttggggcatcaaagctaccaccaactgatgagatcgagatcgcaacgtgggtgcagggaacttgcgagtacttggaccccgaataccttatgacacgccaattgaccgataagagcgatgtatacagttttggtgtcatcgtgctggagcttctaactaggaagaaagtattgtacttggacgggccagaggaagacaggagcctggtttcatgcttcaccacagcagtgaaagttggtcgtcattaa

SEQ ID NO: 142 - protein, 382 aa, Oryza sativa
MYDDRKDFNRIDGEFEVVPVVLDGTIRNVYNYACRSSRRTPATARGTGAIAPRATRATPYLDDGCTDINECLHPKEYGCYGNCMNTPGGYTCVCPPGTSGNPTEMNGCHSKDKFTFVVKKRKLIRTKQKFFEQNVGVILQQQMHSGGGARGFRIFSMEELKKATNIFAAGHVLGRGGHGVVYKGVLEDKTIVAIKKSKMMKEAQTKESTIGMSSSSLVAALKLKCPCWSTNSSQITPSTTTSMGRTPKADIPLDIRLQIAAESAEALSYMHSSASPPTLHGDVKMANILLDDKLSAKVSDFGASKLPPTDEIEIATWVQGTCEYLDPEYLMTRQLTDKSDVYSFGVIVLELLTRKKVLYLDGPEEDRSLVSCFTTAVKVGRH

SEQ ID NO: 143 - DNA, 624 bp, Oryza sativa
atgtggtggatggtgttgagggcagtagcagtatcaggggccctgctgctgcttgtggttgtgggttcttccgccgccggtgccggtagtggcagctgccagacaaggtgcggcgacgtggacatcctgtacccattcggcatcggccccaactgctcccgcggcgttgggttcgagatcgagtgcaatacgaggaacggcagcggcgacttggtgccgaccctggcggccaccagcttgagcatcgtgcagaacctgtcggtggagtcgcctccaatggcgaaggtgatgctgccggtggcatacaagtgctacaacgacccaacaaaaacccaagatttcaacggcgaggtagagctgaacaagaccggcgtgtaccgcatctccgatgagctgaacatgctggtcgtcctcgtctgcaacaccatggtgtacaccaagaacggcaacagtgagggcggcctatacccgtacctctactacaccggctgcatcgcctactgcaacgactctaggagcgcacaagacggcaagtgcgccggtgccggctgctgccatgtcgacatccccggtggcctcaccgacaacaccctcgtcttcgactcgtggaaccgtaccaagtag

SEQ ID NO: 144 - protein, 207 aa, Oryza sativa
MWWMVLRAVAVSGALLLLVVVGSSAAGAGSGSCQTRCGDVDILYPFGIGPNCSRGVGFEIECNTRNGSGDLVPTLAATSLSIVQNLSVESPPMAKVMLPVAYKCYNDPTKTQDFNGEVELNKTGVYRISDELNMLVVLVCNTMVYTKNGNSEGGLYPYLYYTGCIAYCNDSRSAQDGKCAGAGCCHVDIPGGLTDNTLVFDSWNRTK

SEQ ID NO: 145 - DNA, 993 bp, Oryza sativa
aaaatgaatgaatatttcaaaaagaatggtggttcaatactacagaaagtggacaatgtcaagattttttccaaagatgagctaaaaaagatcacaaagaacaattcagaggttcttggtcaaggaggctttggtaaggtatacaaggggactcttggagataatactattgtcgctgtgaagacctcaattgaggtaaatgaagcacgaaaggatgatttcacaaatgaggtggatgttccgatgttggtatatgaatttgcggctaatggcaatctgcaagatattctccatggtgatggcaatatccctctaccattacacttacgcctagacattgcaattgaatctgccgaaggtctaagatacatgcactcctcaactaatcgtaccatacgacatggcgatgtcaaaccagccaacatacttctaacggataagttcatccctaagatatcagacattggaacttccaagcttcttactgtagacaaagactttaccatgtttgtggtaggaagcatgggctacatagacccagtgttccataagactggtcatttaacacagaagagtgatgtgtatagctttggagttgtactacttgaactcataagtagaaagccaacaatatatggtgaaaattgtagcctgatcattgagttccagcagtcctacgataaagagaatagtgggagaatgatgttcgacaaggatattgaaattgaagaagacatcctcatccttgaagaaattggcaggctggcaatggagtgtttgaaagaaaaggttgaagaacgacctgatatgaaggaggtagcagaacgactagtgatgctgcgaagatctaggaagggtgggcaaggaagttatagtataagccctcaaaactttgaggagatcagcatcgaggggactcctaagagctttggtgctgaaatcagtgaaagtagcaatgcggcggtttctgcaccagccactccagccaactaa

SEQ ID NO: 146 - protein, 329 aa, Oryza sativa
MNEYFKKNGGSILQKVDNVKIFSKDELKKITKNNSEVLGQGGFGKVYKGTLGDNTIVAVKTSIEVNEARKDDFTNEVDVPMLVYEFAANGNLQDILHGDGNIPLPLHLRLDIAIESAEGLRYMHSSTNRTIRHGDVKPANILLTDKFIPKISDIGTSKLLTVDKDFTMFVVGSMGYIDPVFHKTGHLTQKSDVYSFGVVLLELISRKPTIYGENCSLIIEFQQSYDKENSGRMMFDKDIEIEEDILILEEIGRLAMECLKEKVEERPDMKEVAERLVMLRRSRKGGQGSYSISPQNFEEISIEGTPKSFGAEISESSNAAVSAPATPAN

SEQ ID NO: 147 - DNA, 2623 bp, Oryza sativa
atcgacaagccaggcaggaaggtcgcaccagcgcgacggccccgagcggccgccggcggccggagcggccctgctccctcccgccgccgattgcggcttcctggaaaaaaaaatgtacggccaagcctcagccctcagaaagctgcagatgttgatttttcaatatatttttttagaaagggaaatgctttgggttgacctgatggttgactagtcggctccccccaaccaccacgtgcgccctacttctttgtccgcccactctttctcccgtcatcagatctgcctggttctcttcttcaagaacacggtttcttcaatcctggcgaaccgactgtccgtgaagtactaagctacagctacaggcacaatataacaacatattctgtgccactcatatgggagactggtatgagaaactttcacaatcttttagggatactgcaaatgaagtattggcaaaagcagatattgatccaaatgttaggtgcttcacaagaaggcagatgaagcacatcacaaacaactacggcactgtcctgggaaaaggaggtttttctgtggtgtacaagggaaaacttgataatggccgttcagtggcagtgaaacaatataattggagaacacaggaaaaggagttcacaaaagaagcgatcatacagtcccagtgtagccataggaacattgttaggttattgggttgttgtgtggaggcagatgctccaatgctggtcactgagtttgtccccaatgggaacctttctgaacttctgcatgggaagagtggccagcttcctgtctcattagagacacgcttccagattgcattggatgtagcagaagcacttgtatatatgcattgctcccaaaatcatccaatccttcatggagacatcaaaccatcaaacatacttctaggtgacaagcatgtggcgaagctatgtgactttggaatatctaggcttctctgtatggacaatgatgaacacacgggctttgttataggaagtaaaggatacatggatccagtgtactgtgagactggacgactaagcccaaaatgtgatgtctacagttttggggttgttcttttggagctcatcaccagaaagaaagggattgatgaccagagcagaaatctagcgggaatgtttgctcgctcaagtagagataaaagacatgaactatttgacaaggaaattgcagccgatgagaatatagactttatagaggaaattgcaaatcttgcacttgattgtttaaagtctgaaatagaagatcggccgcaaatgaaagaagttttgaaacagctttggagtatcaaaaggtcagagatattgagacaggagagaaggcttgcagagttgagagagagaaggatcatgacattaagggaaataaagatttgttacaaaagcgacatagattccatcataggtgacccagaacaggaatcaacctcagagacattttcaggaaaaagtgatgttgccatgggcaaggtttacatgggacgtttgaaaaacactccattgattgtgataaagatgtctgtggaagttgatgaggattggaaacagacatttttttatgagatgatcatgcaatctagaattaagcattggaatgttgccaagcttttcggctgctgcctagatcatgtcgatgccccagtattagtctatgagtatggtgagatgggcttgcatgacgctctttttggtaaggcgtggcagagtattgaacatcctttcacttcctatgtacgtctacaaattgctactgatgctgcagaaggccttgctcaccttcactcatttgacatggttcatggcgatgtcagaactgccaatgtaatagtggatgttttttctggatctaagctcgaaatgcctagaactagtacatttccggcaaagattgctggttttggaacaacaaagctcctttccttggacaaggctcagtatgcaagatttctaacagagaacatacattacaaggatccacacttcctaataactgggctcatgactaaggaacacgatgtgtatggttttggaggggttcttgtggagctcttcacaggaaacaagattcaaatgcacgacataaatacggtaattaaatattttgatagcgtatttgctatatgccatcatctcgaggaaattaaggaactagcttcgtggtgtgttgcacccgaggttacagaaaggccaaccatggccaaggtagtacgatgcctccacgatatcttgaaagatcagcgacggccttgcccttgcccctgcaagtcaatgcattaggccctttgtttcggcttaggctttagaacagccaaattaataatgagataaaacaaacaaaaaggaccttagtttgcaatgtaatttcaggctgacaagtggctcataactccagaattgtgatatcggaagtcactccaagttgccagtaactgtgacttaaatgttacagtatattatatgtttgccagtcaacttagacagtgataatattgttgctgcggttttctactacgattcgcgcaagtcttggaggcacagttcgaatgcactatgatactaatataaaagctgttcgaagtgctttggacgat

SEQ ID NO: 148 - protein, 636 aa, Oryza sativa
MGDWYEKLSQSFRDTANEVLAKADIDPNVRCFTRRQMKHITNNYGTVLGKGGFSVVYKGKLDNGRSVAVKQYNWRTQEKEFTKEAIIQSQCSHRNIVRLLGCCVEADAPMLVTEFVPNGNLSELLHGKSGQLPVSLETRFQIALDVAEALVYMHCSQNHPILHGDIKPSNILLGDKHVAKLCDFGISRLLCMDNDEHTGFVIGSKGYMDPVYCETGRLSPKCDVYSFGVVLLELITRKKGIDDQSRNLAGMFARSSRDKRHELFDKEIAADENIDFIEEIANLALDCLKSEIEDRPQMKEVLKQLWSIKRSEILRQERRLAELRERRIMTLREIKICYKSDIDSIIGDPEQESTSETFSGKSDVAMGKVYMGRLKNTPLIVIKMSVEVDEDWKQTFFYEMIMQSRIKHWNVAKLFGCCLDHVDAPVLVYEYGEMGLHDALFGKAWQSIEHPFTSYVRLQIATDAAEGLAHLHSFDMVHGDVRTANVIVDVFSGSKLEMPRTSTFPAKIAGFGTTKLLSLDKAQYARFLTENIHYKDPHFLITGLMTKEHDVYGFGGVLVELFTGNKIQMHDINTVIKYFDSVFAICHHLEEIKELASWCVAPEVTERPTMAKVVRCLHDILKDQRRPCPCPCKSMH

SEQ ID NO: 149 - DNA, 2010 bp, Oryza sativa
atgacttcctcagaaaagtattccatgcattttattggctttgcacattataaagtacagactaataataaatacagtgctttgaataatgcaccatcttcacgaattttcaggcacaaatataaccacatcttctgtgtcactgatatgggagattggtatgataaactttcacaatcttttagggatactgcaaaggaagtattggcaaagacagatattgatccaaatgttaggtgcttcccaaaaagacagatgaagcgcatcaccaacaactacagcactaccctgggaagaggagggttttctgtggtgtacaagggtaggctcgacgatggtcgttcagtggcagtgaaacaatataattggagaacacagaaggagttcacaaaagaggtgatcatacagtctcagtgtagccataagaacattgttaggctattgggctgttgtgtagaggccgctgctccgatattggtcaccgagtttgtccccaacggaaacctttctgaccttctacacggcaacagtggactgcttcctgtcacattagagacacgcttacagattgcgctggatgtagcagaagcacttgtatatatgcattgctcccaaagttatccaatccttcatggagatgtcaaaccgtcaaacattcttctgggtgacaagggtgtagcgaaactgtgtgactttggaatatcaaggctgctctctatggatagtgatgaatacacaggatttgttatcggaagtaaaggttatgtggatcctgttttctgccagactgggcgattaagccaaaaatgcgatgtctacagcttttgggtggttcttttagaactcttcaccagaaagaaaggaattgatgacatgaaagtgtgtcttgcagaaatttttgcttgttccagtaggaaaggtgatgaacataaactatttgacatggacatcgtaaccaatgagaatatggagtttcttcaaggaattggcagggtcgcactcgaatgtataaagtttgaagtagaggaacggccagagatgaggctagttttagagcagcttttgagtctcaaaagatcccgagataagagcattcatgagatgctggttgtacgtaaagagattgaggtatttttgagaggatgtggttttggaagatttatattgagtaaagagagtgtggatgacttgatatgcaacttgaaaattgttctgaaggaatgtgcgtcaggcaaggcttacatagggaaatctcgcggcacaccactgatggcgataaagatgtcaactgcagttacagagaaatggaaagacatgcttgggaatgaaatagctgtccaatctagaattaagcacatgaatgttgccaagcttatcggttactgcttagatcattcggatggtacagtgcttatatacgagtacggtgcaattagcttgtatgatgttctttttggtgatgcggggaagatatatcgtcccttcacttgtgacctgcgcctgaagattgcgattggtgctgcagagggcattgctcacctgcattcacttggcgtcgtgcatggcgatgtcagcattaacgacatactgctggatcatgtctcttcgtccctggtaaagattgctggctatgggacatcagggctccctgacatcgacaaggctctggattcgcttgaaaccggtcatgggaagaaggagcatgatgtgtacagttttgggcttgttctcctaaccctcttcacgtggaagaaggtgtcactgccacatgatctcaagtccgagcctgacaaacctgtgctactgcaccaggaagccatccgtgggcgtagatgcaatcatcttgagatgatcaagggcttggcttcacggtgtctgacgtccgaggcgacgaagagaccatccatggtggaagtagcaaaacatctcaacttcatacttatttttcctgaaaggaggaaaacttgccatgacctggcgatttatcaatctcgaatgctttcggactag

SEQ ID NO: 150 - protein, 669 aa, Oryza sativa
MTSSEKYSMHFIGFAHYKVQTNNKYSALNNAPSSRIFRHKYNHIFCVTDMGDWYDKLSQSFRDTAKEVLAKTDIDPNVRCFPKRQMKRITNNYSTTLGRGGFSVVYKGRLDDGRSVAVKQYNWRTQKEFTKEVIIQSQCSHKNIVRLLGCCVEAAAPILVTEFVPNGNLSDLLHGNSGLLPVTLETRLQIALDVAEALVYMHCSQSYPILHGDVKPSNILLGDKGVAKLCDFGISRLLSMDSDEYTGFVIGSKGYVDPVFCQTGRLSQKCDVYSFWVVLLELFTRKKGIDDMKVCLAEIFACSSRKGDEHKLFDMDIVTNENMEFLQGIGRVALECIKFEVEERPEMRLVLEQLLSLKRSRDKSIHEMLVVRKEIEVFLRGCGFGRFILSKESVDDLICNLKIVLKECASGKAYIGKSRGTPLMAIKMSTAVTEKWKDMLGNEIAVQSRIKHMNVAKLIGYCLDHSDGTVLIYEYGAISLYDVLFGDAGKIYRPFTCDLRLKIAIGAAEGIAHLHSLGVVHGDVSINDILLDHVSSSLVKIAGYGTSGLPDIDKALDSLETGHGKKEHDVYSFGLVLLTLFTWKKVSLPHDLKSEPDKPVLLHQEAIRGRRCNHLEMIKGLASRCLTSEATKRPSMVEVAKHLNFILIFPERRKTCHDLAIYQSRMLSD

SEQ ID NO: 151 - DNA, 2139 bp, Oryza sativa
gtgaagcgactcgaggaatccaataagtgaggctagctccatttcataacagctcatcgggcgtccgtgcaggcacaatataaccacatcttctgtgtcactcatatgggagattggtatgataaactttcacaatcttttagggatactgcgaaggaagtattggcaaaagcggatattgatccaaatgttaggtgcttcacaagaagacagatgaaacgcatcacaaataactacagcactaccttgggaagaggagggttttctgtggtgtacaagggtatgctcgacgatggccattcagtggcagtgaaacaatataattggagaacacagaaaaaggagttcacaaaagaagtgatcatacagtcccagtgtagtcataggaacattgttagattattgggttgttgtgtggaggcagatgctccaatgctggtgactgagtttgtcccgaatggaaacctttctgaacttctgcatgggaacattggtcagcttcctgtctcattagagacacgcttccagattgcattggatgtagcagaagcagttgtatatatgcattactctcaaaatcatccaatccttcatggagacatcaaaccatcaaacatacttctaggcgacaagtatgtggcgaagctatgtgactttggaatatctaggcttctctgcatggacaatgatgaatacacggggtttgttataggaagtatgggatacatggatccagtgtaccgtgagactggacgactaagcccaaaatgtgatgtctacagttttggggttgttctgttggaactcatcaccagaagcaaagggattgatgatcagaacagaagtctagctagagtttttgctcactctagtatagatgaaagatataaactatttgacaacgaaattgtaaccaacgagaatgtggacttcatacaggaaatggcaaaccttgcacttgattgtttgaagtctgaaatagaagatcggcctcaaatgaaagaagtcttggaacatctttatagtctcaaaaggaaaatgttggaacaggagaggaagattgcagagttgatggaagagagaaggattgcagagttgacagagcgaagaactgtggcatttagggaaatcaaggccatattgcaagatattggttttgaaagactcgtcacaaaagaaaaaatagattccatcgtaggcaacccgaaacaggtatcaacctcagaggcattttcaggaaaaagtagtgttctcattcagcgtgccattggcaagatttgcatgggacatttgaaaaacattcgatttatcgtgataaagatgtctgttgaggctgatgagatttggaaagagatgtttctttatgagatgatcaagcaatctagaattgagcattgcaatgtcgccaagctttttggctgctgcctagatcatgtggatgccccagtattagtttataagtatggtgacataggcttgcatgatgctcttttcggtaacgcgtggcagcagtttgattgtcctttcgcttgcgaaatacgtctagagattgcagttggtgctgcagaaggccttgctcacctgcactcacttaatgtggttcacggcgatgtcagaactgccaatgtagtactggatgtttattctaaatctaagctcgaaatgcctgggataactgcatttatggcaaagattgcaggttatggaacacaaaggctcctttccttggataaggccaagcatgaaatatttctaacagagaacatccattacaaggatccacacttcctcaagactgggctcatggctaaggaatatgatgtatatggttttggcgtggttcttgtggagctcttcgcacagaacatggtgcaaatgcatgacgtaaacatggtgctcaaagaacttgatggcattcctgctagatgccatcatcttaaggaaattaagaaacttgcttcttggtgtcttgcatccaaggtgacggagaggccagcaatggacaaggtagtacgatgccttcgagctgtcttgacaaacctgcaaaatcttcatgatccctgcaactgcaagtcaatgtataataagtctgcgatgcagtccgagcaaattaccagtgccaagtctgccagtagctga

SEQ ID NO: 152 - protein, 677 aa, Oryza sativa
MGDWYDKLSQSFRDTAKEVLAKADIDPNVRCFTRRQMKRITNNYSTTLGRGGFSVVYKGMLDDGHSVAVKQYNWRTQKKEFTKEVIIQSQCSHRNIVRLLGCCVEADAPMLVTEFVPNGNLSELLHGNIGQLPVSLETRFQIALDVAEAVVYMHYSQNHPILHGDIKPSNILLGDKYVAKLCDFGISRLLCMDNDEYTGFVIGSMGYMDPVYRETGRLSPKCDVYSFGVVLLELITRSKGIDDQNRSLARVFAHSSIDERYKLFDNEIVTNENVDFIQEMANLALDCLKSEIEDRPQMKEVLEHLYSLKRKMLEQERKIAELMEERRIAELTERRTVAFREIKAILQDIGFERLVTKEKIDSIVGNPKQVSTSEAFSGKSSVLIQRAIGKICMGHLKNIRFIVIKMSVEADEIWKEMFLYEMIKQSRIEHCNVAKLFGCCLDHVDAPVLVYKYGDIGLHDALFGNAWQQFDCPFACEIRLEIAVGAAEGLAHLHSLNVVHGDVRTANVVLDVYSKSKLEMPGITAFMAKIAGYGTQRLLSLDKAKHEIFLTENIHYKDPHFLKTGLMAKEYDVYGFGVVLVELFAQNMVQMHDVNMVLKELDGIPARCHHLKEIKKLASWCLASKVTERPAMDKVVRCLRAVLTNLQNLHDPCNCKSMYNKSAMQSEQITSAKSASS

SEQ ID NO: 153 - DNA, 2828 bp, Oryza sativa
gggcgacggtcgacggcccagctccgtttcattcggtggagtcttcgccgtttggcgatagacggctgggccctctccggctctccgccaacctcgcttctccccgcgatgcgaccccgaatcccgccgccggccggggctcttgctccgctcccccctcgaccaggggcctcctcttaccttccgaggccgtctgcatcccatcagatcccgacctcccgtgctccgcctgccgacgccggccagagtgctccaggagcaaaccaaccagaggccagagccactggcctgccagggaatggtaatacgccggctccggcctgagaagcgcatcctgttgatgaagaagaagaagaataggaagaatacaaggcaggccttccaggaatttgaagatgcagatatagttgaccttcacacggacgaccttgcaaccgcttctacctacctgaaatatgattgatgatagtagtttcttcctcagctgcacttcttccacctcctccaatctgcacttgtgcagcctgtgacgcctgagaatacatcaagtgaggctccatttcgtaactgctcgtcgctcgtccgtgcaggagcctattaacctacaggcacaatataactatatcttctgttcactcttatgggagattggtatgaacaattttcacaatcttttaaggatgctgctaaggaaatgttggcaaaaacagatattgatccaaacgttaagtgcttcacaagaaagcagatgaagcgcatttcaaacaactacagaactatccttgggaaagggggcttttctgtggtgtacaagggtaggctcaatgatggccgtgcagtggcagtcaaaaaatataattggaaaacacagaaaaaggagttcacaaaagaggtaatcatacagtctcagtttagccataagaacattgttaggctattggggtgttgtgttgaggcagatgctccaatgttggtcactgagtttgtccccaatggtaacctttccaaccttctgcacagcaacagtagccagtttcctgtttcattagggacacgcttacagattgcactggatgtagcagaagcacttgtatatatgcattcctcccaaaatcatccaatccttcatggagatgtcaagccttcaaacattcttctgggtgacaaggatgtggcaaaactctgtgactttggaatatcaaggctgttatgtatggatagtgacgaatacacgggatttgttataggaagtagaggctatgtagatcctgtgttctgccagactgggcggttaagtctaaaaagcgatgtctacagttttggggttgttcttttagaactcatcaccaaaaagaaaggaattgatgacaagaaagtgtgccttgcagaaacttttgctcgcatcagtagaaaaggtaatggacacgaactatttgacatggacgttgtaacaaatgagaatatggagtttcttcaaggaattggcaggcttgcacttgaatgtataaagtttgaagtagaggagcggccagaaatgaaagaagttttagagcgcctttggagtctcaaaagatcccgagataggagaatccgtgagatgcaggttatggtacggagcgagattgaagtactttggagaagatgtggctttggtaggtttatgatctcgaaagagagaatggacgatatgacatactacttcaaaactgttctcaaggaatgtgcatcaggcaaggcttacatagggagattttgcaacgcacaactgctggtaataaagatgtcgatttcagttttagatcaatggaaaaacatagtctggaacgaattgaatgtccaatctagaattaagcactggaatgacgccaagcttctcggttactgcttagatctttgggaaggtctagtgcttgtatacgagtatggtgcgatgagcttgtatgatgttctttttcatgatgcaaggaaggtatctcccttcatttgtggcctgcgcctgaagattgcggttggcgctgcagagggccttgctcacttgcactcacttggcattgtgcatggcaatgtcagcactgtcaatatattgctggatgatctttcggtactcaaagtgattagccgcaattacccagtaaagattgcaggctatggaacatcagggctccctgacattgacaaggcacagcacacaggattcttcatggaggattcgcttgtaaccagtcatgggaaggagcatgacgtatactgtttcggtcttgttctcctaacgctcttcacatggaagaaggtgtcactgcaagaggcggataccgtgtttgagcagctctgggacattggaccgccacatgatgtgaattccgagcctgagaaacctgggcaacagctcaaggaagccatccttagatgccgtcatcttgaggaggttaagagcctggtttcacggtgtctgacgtccgaggtgacgaagagaccatccatggtggaagtagcaaaacatctcaagaacataaatgatttacatgatagcacagcttgccatgagctggcgatttatcaatctcgaatgctttcgggctaggctaggctgcaagtagcagtcgtacatggttcttctttgagtaaattaaggtgccgtagtagatgctataatgcaagcgccaagcaacatattacatatgtgtattttatatcccgacaaagaaaaaaagacatgtgtattgcatatattttgtaacagcaacggatgtttgtcatgttgattctcgtggcgctgctgccatataatgttgattgacagatccttggggaaccaacggatgaactaa

SEQ ID NO: 154 - protein, 646 aa, Oryza sativa
MGDWYEQFSQSFKDAAKEMLAKTDIDPNVKCFTRKQMKRISNNYRTILGKGGFSVVYKGRLNDGRAVAVKKYNWKTQKKEFTKEVIIQSQFSHKNIVRLLGCCVEADAPMLVTEFVPNGNLSNLLHSNSSQFPVSLGTRLQIALDVAEALVYMHSSQNHPILHGDVKPSNILLGDKDVAKLCDFGISRLLCMDSDEYTGFVIGSRGYVDPVFCQTGRLSLKSDVYSFGVVLLELITKKKGIDDKKVCLAETFARISRKGNGHELFDMDVVTNENMEFLQGIGRLALECIKFEVEERPEMKEVLERLWSLKRSRDRRIREMQVMVRSEIEVLWRRCGFGRFMISKERMDDMTYYFKTVLKECASGKAYIGRFCNAQLLVIKMSISVLDQWKNIVWNELNVQSRIKHWNDAKLLGYCLDLWEGLVLVYEYGAMSLYDVLFHDARKVSPFICGLRLKIAVGAAEGLAHLHSLGIVHGNVSTVNILLDDLSVLKVISRNYPVKIAGYGTSGLPDIDKAQHTGFFMEDSLVTSHGKEHDVYCFGLVLLTLFTWKKVSLQEADTVFEQLWDIGPPHDVNSEPEKPGQQLKEAILRCRHLEEVKSLVSRCLTSEVTKRPSMVEVAKHLKNINDLHDSTACHELAIYQSRMLSG

SEQ ID NO: 155 - DNA, 2442 bp, Oryza sativa
atggccatccaccccgcctgcacttcaagacctatgaaaatacatgatttttgcaagcggacattggctgattttgataggcggcagacggccatcttgcccccttcccatcttgcatgcggaatagtggtgcagcagctgcaggcgggagcagcagcagcagcagctgcaggcgggatcagcatcgagtacccgttctgcgtggagcctggctgctaccacccaggcttcaacctcacctgcaaccactcctacagcccgcccaggctattcctcggcgacggcacggtgcaggtgctcgagatcgccatcccccaagccaccgtgcgcatcaacagcggccgcatggtgttcaattctactggcaatcatgccgtcaacagatcattattggatcaggtgggaaggccgtacttcgtggcagcttcaaacaggatagctttgctaagctgcaacgcccgggttgacgtccgcgcggctgggagaaacaacaacaaaactagtactaagttgctcagttcctgcactgccatctgcccaacagacgatggaggtggtgctaccactatcctcgatattggtccagagggtccatgctcagggattggctgctgtgaaacaagcatgctactagcaggaagctcgactgctgcctacagcatccaggtccagaacttgcaggagcaggccgtcgtgctaaatcgaacggatgatctggtgtacttggtagatgagagatttaactataccttggacatgtctttcggctacagcagtcctgaagagctcccagcacggctagactggtacataaatagttcatcagcgtgtccgttgcccgcgtccgcccccgaatgtcgcagcgcgcacagctattgcgacagtacttacgacaacaaggcgtacatctgccgctgctccgaaggttacgaaggaaatccctacgttcctgatggatgccatgatacggatgaatgcagttctggatactgcagttacggcgagtgcaggaacacaccaggatcgttcatttgcaactgccctcgtggctacgagggcaatccatcgccaaaagatggatgcaaagacatcgatgaatgtgcgcgccatgatatttacccgtgttatgggaagtgcattaatttgcctggagattatatttgcttatgcaacaatggaacctacggggatgcgaagaaaaaggagggatgcattccgatgaagcaagcacgagatttaggtctacgcatcgggcttggggttggtggtggcacaattcttttgctcctcgcactaagtgctccctttatatcaagcaaaatgaagctgcgcaagatgaaaagaatgaaagagacttttttcaggcaaaaccatggcttgctattaggacgattggtatcacaaaacgcagatattggtcaaaggatgatcatgactttacaagagctagagaaggccacagacaattttgataaatctcgtgaaattggtggtggaggacatggcgtcgtgtataagggaattttagacctgcaagttgttgccattaagaaatcaaggattgtcgtaaaaagagaaatcgatgactttataaatgaagttgcaattctttctcaagtcaatcatagaaacgtggtgaagcttctaggatgttgtcttgagacagaagttccattgttggtttatgagttcatttcaaatggatctctagatcaccatcttcatgttgatggaccaatttcgctaccatgggatgatcgaataaggattgctcttgaagttgctagagccttgacttatctacattcagctactacaataccaatattccatagggatattaaggcatgcaacatacttctcgatgaaaatttaatatcaaaggtatcagactttggagcttcaaggtatattccgattgaacaaactgaagtgactacagcagttcagggaacaattggccatttagatcccatgtactactatacaggtcatctaacagataaaagtgatgtttttagttttggtgttcttcttatagaattgctcactcgaaaaaggcccatgtataggactgatcacggtgaaagtcttgtgttatattttgcctcgcttcatagacaaggtcaggtggttgaaataatagatccacaagtcatgacggagggagatggagaccaaatccaagaagtagcatcactagctgcaacatgcactaaattgaatggacaagaccggcctactatgagagatgtggaaatgacacttgaaaacttgcgagtcaagaagaagcttgcttcacatagtgtaaaatcaagtagatgtaatgcatctgaaattacaaagcattacatgttagttacaggccagggaagcaaggaaatgagcagacaatacagcatggaagaggagatgttgttgtctgaaaggtatcctcgttga

SEQ ID NO: 156 - protein, 813 aa, Oryza sativa
MAIHPACTSRPMKIHDFCKRTLADFDRRQTAILPPSHLACGIVVQQLQAGAAAAAAAGGISIEYPFCVEPGCYHPGFNLTCNHSYSPPRLFLGDGTVQVLEIAIPQATVRINSGRMVFNSTGNHAVNRSLLDQVGRPYFVAASNRIALLSCNARVDVRAAGRNNNKTSTKLLSSCTAICPTDDGGGATTILDIGPEGPCSGIGCCETSMLLAGSSTAAYSIQVQNLQEQAVVLNRTDDLVYLVDERFNYTLDMSFGYSSPEELPARLDWYINSSSACPLPASAPECRSAHSYCDSTYDNKAYICRCSEGYEGNPYVPDGCHDTDECSSGYCSYGECRNTPGSFICNCPRGYEGNPSPKDGCKDIDECARHDIYPCYGKCINLPGDYICLCNNGTYGDAKKKEGCIPMKQARDLGLRIGLGVGGGTILLLLALSAPFISSKMKLRKMKRMKETFFRQNHGLLLGRLVSQNADIGQRMIMTLQELEKATDNFDKSREIGGGGHGVVYKGILDLQVVAIKKSRIVVKREIDDFINEVAILSQVNHRNVVKLLGCCLETEVPLLVYEFISNGSLDHHLHVDGPISLPWDDRIRIALEVARALTYLHSATTIPIFHRDIKACNILLDENLISKVSDFGASRYIPIEQTEVTTAVQGTIGHLDPMYYYTGHLTDKSDVFSFGVLLIELLTRKRPMYRTDHGESLVLYFASLHRQGQVVEIIDPQVMTEGDGDQIQEVASLAATCTKLNGQDRPTMRDVEMTLENLRVKKKLASHSVKSSRCNASEITKHYMLVTGQGSKEMSRQYSMEEEMLLSERYPR

SEQ ID NO: 157 - DNA, 2322 bp, Oryza sativa
atgagagttgtgttttcgctatctgtacttgcagttctgctgctacagctgctgttgggtgtagcaacggcggcagcagctaattgcagcacccactgtggcaacatcggaatctcctatccatttggagtagagcctggctgctaccacgagggcttcaacctcacctgcgatcgctcgcacaagccgcccaagctgttccttggtgatggctccgttgaagtgctcgagatctcgattcctagtggcacggtgcgcatcaacagcagcagtatcgttccagtatcaacatcaagtgctgttggaactggcagtgtcaacaagacagggaaataccacacatggggtggactgagaaagggcggcccgttcttcatctcgccgtacaagaacaagttcctggttctatcatgcagcaatgttcaagttcttcttcttggaggcgataattccactgtcaatgcctgtgctacttactgccctccagcccccaagaaaggccaaccttttcagttcccaatgcgcaacgagtgttctggtattggctgctgcagtgcggccatccccaaaggctacacatcctatagcatccagatccaacctgccaatgaaatttcagagtttgatgcagagtcctctgtgtacatagctgaggaggggtcctataatgccacacgccttatctttgaaactgtcagtgcactcccagctttgctggactgggctattagcaattcgacatgtggtacgaagccatctgcagcccctgcacctgcatgccgcagcagtaacagctattgtcaaaactatacaagctatgtctacaatggctatcagtgtcgctgcaatgctggttatcaaggcaacccttacattccaaacggatgccaaggtttaagcattggtcttgtagtcagtggcggcacagttcttttgcttctggctctttgtgctcccctcgcaacacgtaagattaagctacggaagatgaagaaaacaaaagaaagatttttcaagcaaaatcatgggttgctattgcagcaattaatttcacaaaaggtggacattggggaaagaatgatcattaccttatcagatctagagaaggccacaaacaattttgataaaagtcgtgaggttggtgggggagggcatggcattgtgtacaagggaatacttgacctacatgttgtggccatcaagaaatcaaagatagtagtacaacgagaaattgaccaattcataaatgaggttgcagttctttcccaaatcaaccatagaaatgtagtgaagctcctaggatgctgccttgagacagaagttccattgttggtttatgagtttgtttcaaatggaacactttatgatcatcttcatgttgaagggccaatgtcagttccgtgggatgaccgactaaggattgcacttgaagttgctagagctgttgcgtatctgcattcagctagttctatgccaatattccatagagatattaaatcttccaatatacttcttgatgatagcttgacagcaaaggtgtcagactttggagcttcaaggtacattccaatcgatcaaacaggagtgacaacagctgttcagggaacatttggatatttagatccaatgtactattacactggaaggctaactgacaggagtgatgtttttagttttggtgttcttctcgtggaattgcttactagaaagaagccgtttgtacacacctctagcaacggcgatgctcttgttttacattttgtttcactacatacagaaaacaacttggtcgacatattagatcctcaagtcatggaagagggagatggagaagtccaagaagtagctgcactagcagcaacgtgtattaaattgaagggagatgaccggcctacaatgagagaagtggagatggcacttgaaaatatacgagttaagaagaagcatgctacacttggtacaacatcaaatagatgtgatggggaccaaattgtatgtgattatttgtcgactagaggaatcactgacgaatcaacaagacaatacactatggaagaggaaatattgtcgtctggtacctatcctcgatgatgtttgtctttggcctgaactagaattgctgtttgttatatgtacaacgtttgtaaagcatgtcagtagtgcaagaagtgatcttgctttattgttttggaaatgaagaattgtttctatcccgtcataaacaattcccgaaatcttttcgttggcagcgaatgtctggctcagttgaattcatacattctagataaatcaatgcatgtaaacataacaatggaaggcaat

SEQ ID NO: 158 - protein, 696 aa, Oryza sativa
MRVVFSLSVLAVLLLQLLLGVATAAAANCSTHCGNIGISYPFGVEPGCYHEGFNLTCDRSHKPPKLFLGDGSVEVLEISIPSGTVRINSSSIVPVSTSSAVGTGSVNKTGKYHTWGGLRKGGPFFISPYKNKFLVLSCSNVQVLLLGGDNSTVNACATYCPPAPKKGQPFQFPMRNECSGIGCCSAAIPKGYTSYSIQIQPANEISEFDAESSVYIAEEGSYNATRLIFETVSALPALLDWAISNSTCGTKPSAAPAPACRSSNSYCQNYTSYVYNGYQCRCNAGYQGNPYIPNGCQGLSIGLVVSGGTVLLLLALCAPLATRKIKLRKMKKTKERFFKQNHGLLLQQLISQKVDIGERMIITLSDLEKATNNFDKSREVGGGGHGIVYKGILDLHVVAIKKSKIVVQREIDQFINEVAVLSQINHRNVVKLLGCCLETEVPLLVYEFVSNGTLYDHLHVEGPMSVPWDDRLRIALEVARAVAYLHSASSMPIFHRDIKSSNILLDDSLTAKVSDFGASRYIPIDQTGVTTAVQGTFGYLDPMYYYTGRLTDRSDVFSFGVLLVELLTRKKPFVHTSSNGDALVLHFVSLHTENNLVDILDPQVMEEGDGEVQEVAALAATCIKLKGDDRPTMREVEMALENIRVKKKHATLGTTSNRCDGDQIVCDYLSTRGITDESTRQYTMEEEILSSGTYPR

SEQ ID NO: 159 - DNA, 2193 bp, Oryza sativa
atgcatgtttttgccatagccacactgcacttgctgcagtttctagcagcaatacccctgatactttcatataacatagcattgcctggttgcactgacacatgcggaaacacaaccataccttacccattcggtattggcgacgaacggtgcttccgcgagggcttcaaactagtgtgcgacccagcttatgatccccccaagctcttcatgaacggccctggatatgaagttcacaagataaagctggcacgtagagttctgcaccttgataccggcatcacccaaatgttggggggagacagctacaaccagaaatggatcctcgacttggatgacaaactcttccgggtatcggcagacatgaatgttttcatcaccctgggttgtggtttccacttcttcataggtagttctcctgcagcagcaggagacaatgctactagcagcagcaactgcgtttcgaattgccgcccaggttaccccatactggcaacggatggcacatgctatggcattggctgctgcaacgcatcggtggttgaagaccacaactcctacacgatcaagcttctctccctgcagtctagtccaagggcggtgccgttcaacgcgagcatggtggtggtgaagggggagtggtggaggagggcagacaatgccatgctgctgcagcaagaggtcctgtcaaggctgggtgccatcgctggggcgccggatgctgcaaggaatgtgggtgtccggactgtggttaactggatgctggggagaggctatgcgtgcaagtgccgctcaggatatgatggtaacccttacatgccaaatggatgccaagatattaatgaatgcatgctgccaaatccacccctatgctttgggaaatgcataaatacagtaggatcatatgagtgtatctgtccaggtggcacatctggtaacgcccatatacaaaatggatgtgtttcaagcaaacttaaattttcaggactcatcattggaataggacttggtggcagtctaatcatcgtggtactaattcttactggaattgtcgtaaggcgaaagttcaagtctcgaagggccaaaaaactgaaggaattcttcttcaagcaaaaccgaggattgttgcttcatcaacttgtagacaaggatatcgctgaaaggatgatcttcagcttagaagagcttgagaaggcgacaaacaattttgacgagtctcgaaagcttggtggtggtggccatggaaccgtctataaagggattttgtctgaccaacgtgttgttgctatcaagaagtcaagatatgctattaagagagaaattgatggatttattaacgaggttgccatactttcccaagtaaatcacaggaatgtagtgaagctttttggatgttgtcttgagacagaagttccattgttagtctatgagttcattccaaatggaacacttcatgaatatcttcatgtcaactctgcacaatcagtcccatggaaggaacggctgaggatagcacttgaaatagctaggtctcttgcttatctacattcagctgcttcggtatcaatcatccacagagatatcaagaccaccaacattctacttgatgataggttcatagcaaaagtatccgacttcggagcttctcgaggtatcccaattgatcaaaatattgtaactactactatccagggaacttttggatacttagatccagagtactaccgtaaaagccgacttacggagaaaagtgatgtatacagctttggtgtcatacttgcggagctaataacacgaagaaggccaacttcctacatatcaccagaaggcttcaatctaaccgaacaatttatcttgctagttagtgaggacaggctcttggaaatagtagacagtcaaatcactaaggagcagggagaagaagaagccagagaagtggcagaaattgctgttatgtgcttaaacttaaagggtgaagacaggccgacaatgcggcaggttgaggtgaaacttgaagggttgcagggtgctgtaaacactatcagaggtcgacgtgcagttcagttgaattctccattgactgaagagagcgattccaacatcgttgctgttggtgacgctggttatcacaactcaagcaggcggctcagtatggaggaggaattctggtcatctatgagctttcctcgttga

SEQ ID NO: 160 - protein, 730 aa, Oryza sativa
MHVFAIATLHLLQFLAAIPLILSYNIALPGCTDTCGNTTIPYPFGIGDERCFREGFKLVCDPAYDPPKLFMNGPGYEVHKIKLARRVLHLDTGITQMLGGDSYNQKWILDLDDKLFRVSADMNVFITLGCGFHFFIGSSPAAAGDNATSSSNCVSNCRPGYPILATDGTCYGIGCCNASVVEDHNSYTIKLLSLQSSPRAVPFNASMVVVKGEWWRRADNAMLLQQEVLSRLGAIAGAPDAARNVGVRTVVNWMLGRGYACKCRSGYDGNPYMPNGCQDINECMLPNPPLCFGKCINTVGSYECICPGGTSGNAHIQNGCVSSKLKFSGLIIGIGLGGSLIIVVLILTGIVVRRKFKSRRAKKLKEFFFKQNRGLLLHQLVDKDIAERMIFSLEELEKATNNFDESRKLGGGGHGTVYKGILSDQRVVAIKKSRYAIKREIDGFINEVAILSQVNHRNVVKLFGCCLETEVPLLVYEFIPNGTLHEYLHVNSAQSVPWKERLRIALEIARSLAYLHSAASVSIIHRDIKTTNILLDDRFIAKVSDFGASRGIPIDQNIVTTTIQGTFGYLDPEYYRKSRLTEKSDVYSFGVILAELITRRRPTSYISPEGFNLTEQFILLVSEDRLLEIVDSQITKEQGEEEAREVAEIAVMCLNLKGEDRPTMRQVEVKLEGLQGAVNTIRGRRAVQLNSPLTEESDSNIVAVGDAGYHNSSRRLSMEEEFWSSMSFPR

SEQ ID NO: 161 - DNA, 2653 bp, Oryza sativa
aggtttgaggcacactgcgaagaatcaaagatggagaaacatgcagtagcattagcagcattcacttttctagccgcccccctgctgcagctgctgttgtttgtcgcggggaacggcagcagctgcaccaccagctgcggcaacgtgagcttcgagtacccgttcggcgtggaggccgggtgctaccacccggggttcgatctcacctgcaaccactcgtacagccgcccaggctgttcctgggccaagaaagcagcaccatgcatcaggtgctcgagatctccatccccaacggcaccgtgcgcatcaacagcagccgcatggtgtttgcgtctgccgttttagagaacagcaccaccatgcggtgggaggtgggtaaatcctacttcctgtcggatttaaacattatagcgttggtaggatgcaacgcccaggtctccctccgcgattggggcgatacactcgtcaactcctgcatcacgtcgtgccctctatcactcgactccggtaatggctcctgctcaggaattggctgctgtgaggcaagcattgctatgcacataccggtctacagcattagcgccaaccaagtggtggacccgggtgcaggacctgaccctaatgaaccaaattttttcgtgtacatagtagatcaggcgtcgttttatttcgacaccaacatggttactaagggcatcagcaatactcctgaagcgctcccagccatgttaaactggcttatactcagcaattcatcagcgtgctcggcatcgaccaatgcttctgcaccttcgtctgcccccgaatgttgcagcgccaacagcttctgcaaaggttacaacggtactactgctgactacgatgggtatcggtgctactgctccgatggctatgaaggaaatccttatgttgatggtggatgccgcgatatcgatgaatgcaaatctccacacatctacccctgttacggcgactgcaaaaatacacgaggagggtatgattgccagtgccatcatggatacaagggaaacgcttcgatactgaatggatgtcaagatattaacgagtgtgcggaaccagaaaaatactcatgctatggtggactctgcataaatacgccaggagcttttgtttgccgctgccacgacggaagctacggtgatcccttcacaaaaggagggtgccgttcatctaaaggtttgaccattggtctaatagtcagcggtggttcagtccttctacttctagggcttgctgctcccttcatagttcgcaaggtcaagctacaaagggtaaagaaaatgagggataaattctttatgcaaaaccatgggttattattacaacagttaatatcacgaaacacagacttcgccgaaagaatgatcattaccttacaagagcttgagattgctacaaacaattttgacaaatctcgtgaggttggtactggaggacatggggtcgtgtataaagggattatagatctacatgttgtggccatcaagaaatcaaagattgttgtgcaaagagaaatagatgaattcataaatgaagtcgcaattctttcccaagtgaaccatagaaatgtggtaaagctcctcggatgttgccttgagacagaagttccattattagtttatgagttcatttcaaatggaaccctttaccatcatcttcatgttgaaggatctatatcattaccttgggatgatagattaaggatagctcttgaagttgctagagctctttcatatctgcattcatcggcatcaatgccaatattttatagagatattaaatcttccaatatacttcttgatgacaacctaacagcaaaggtatccgactttagagcttcaagatatatctcaatcaatgaaacaggaataactactgcagttcaaggaacgattggctacttggatcctatgtactattatacgggacgacttacgagcaagagtgatgtttttagttttggtgttcttcttatggagctacttactcgaaagaaacccatcggtggtacatttgataatggcgatggtcttgtttcacatgttatctcacttctctcaaaaggtaatctttataatataatagattctcaagttaaagaagaggaagatggagaagtcctagaagtggcaacactagccacaacatgtactaagtttaaaggagaagagcggcctacgatgagagaagtagagatggcactggaaagcatagtttcaaagaaaagctccttctgtaacaagaacagtcaatcaagtagtagatccgatgaaaatcgaattttagctctttacatgtcgatcgaaggagttaccaaggacaaaacaattacaattacagaaagcagcacggaaggggaaataccattgtcgtcaaggttttctcgataatcattctctgtcctgaacgagaacgccttgcaagaaagccggaaacttagttacatcgatcctgttctgttctaaatgattgctaaagtaattttgctgtaaaacaataataatgcaacagaaaaattgtgtcgtatcagaactttgaagtacttgtggtttagttcatgttgattaagcatctgattcgatcagtttgctctaatggactgaaattgcagagtgccgtttgtgttttcatt

SEQ ID NO: 162 - protein, 716 aa, Oryza sativa
MHQVLEISIPNGTVRINSSRMVFASAVLENSTTMRWEVGKSYFLSDLNIIALVGCNAQVSLRDWGDTLVNSCITSCPLSLDSGNGSCSGIGCCEASIAMHIPVYSISANQVVDPGAGPDPNEPNFFVYIVDQASFYFDTNMVTKGISNTPEALPAMLNWLILSNSSACSASTNASAPSSAPECCSANSFCKGYNGTTADYDGYRCYCSDGYEGNPYVDGGCRDIDECKSPHIYPCYGDCKNTRGGYDCQCHHGYKGNASILNGCQDINECAEPEKYSCYGGLCINTPGAFVCRCHDGSYGDPFTKGGCRSSKGLTIGLIVSGGSVLLLLGLAAPFIVRKVKLQRVKKMRDKFFMQNHGLLLQQLISRNTDFAERMIITLQELEIATNNFDKSREVGTGGHGVVYKGIIDLHVVAIKKSKIVVQREIDEFINEVAILSQVNHRNVVKLLGCCLETEVPLLVYEFISNGTLYHHLHVEGSISLPWDDRLRIALEVARALSYLHSSASMPIFYRDIKSSNILLDDNLTAKVSDFRASRYISINETGITTAVQGTIGYLDPMYYYTGRLTSKSDVFSFGVLLMELLTRKKPIGGTFDNGDGLVSHVISLLSKGNLYNIIDSQVKEEEDGEVLEVATLATTCTKFKGEERPTMREVEMALESIVSKKSSFCNKNSQSSSRSDENRILALYMSIEGVTKDKTITITESSTEGEIPLSSRFSR

SEQ ID NO: 163 - DNA, 1038 bp, Oryza sativa
atggagaagaggaggatgctgagggcgaagcagaggttcttcgagcagaacggcggcctcctcctgcagcagcagctgggttccctggccgcctccggcgtggcgttcaagatcttctccgaggaggaggtcagcaaggcgacggacggcttcgccgaggcgcgggtcctcggccgcggaggccacggcgtcgtctaccggggctccctcgccgacggctccacggtggccgtgaagcggtcgagggtggtggaggagaagcagctcagggagttctccagggagatgctcatcctctcgcagatcaaccacaggaacgtcgtcaagctgctcggctgctgcctcgaggtccaggtccccatgctcgtgtacgagtacgtccccaacggcagcctccaccggtacatccacggcggcggcgccggagccggcgagggcctgtcgccggcggaccgtctccgcgtcgcggccgagtcggcggacgcgctggcgtacatgcactcgtcggcctcgcccccgatcctccacggcgacgtcaagtccgccaacatcctgctcgacgccgggctcacggccaaggtgtccgacttcggcgcgtcgaggctcgcgccggcggccgacgaggccgaggtggcgacgctggtgcaggggacttgcgggtacctcgacccggagtacctgctgacgtgccagctcaccagcaagagcgacgtgtacagcttcgcggtggtgctcctcgagctgctcacggggaggaaggccttctgcccgccgccggacagcgccgccggctcgcaggacgacgacgacgacgacgacgaccggagcctcgcgttcttcttcctcactgcggcgcacaagggacggcaccgggagatcatggacgggtgggtcagggaggaggtcggaggcgaggtgctcgacaacgccgcggagctggtgatgcagtgcctgagcatggccggagaggagaggccgaccatgaaggaggtcgccgacaggctcgccgggatgagaagccgcgcaagcgattcataa

SEQ ID NO: 164 - protein, 345 aa, Oryza sativa
MEKRRMLRAKQRFFEQNGGLLLQQQLGSLAASGVAFKIFSEEEVSKATDGFAEARVLGRGGHGVVYRGSLADGSTVAVKRSRVVEEKQLREFSREMLILSQINHRNVVKLLGCCLEVQVPMLVYEYVPNGSLHRYIHGGGAGAGEGLSPADRLRVAAESADALAYMHSSASPPILHGDVKSANILLDAGLTAKVSDFGASRLAPAADEAEVATLVQGTCGYLDPEYLLTCQLTSKSDVYSFAVVLLELLTGRKAFCPPPDSAAGSQDDDDDDDDRSLAFFFLTAAHKGRHREIMDGWVREEVGGEVLDNAAELVMQCLSMAGEERPTMKEVADRLAGMRSRASDS

SEQ ID NO: 165 - DNA, 1317 bp, Oryza sativa
atggcgggcggcatgagcgatggatccggtgccgcgacgacagcgggcggcgtgggcgatggatccgacgccggcggtggaaacagtaactgtgtcgatgatataaagggaggttaccgttgcaagtgctcccatggatacgaaggcaacccatacattaaagatggatgcaaagatatcaatgagtgccttgacaacgctacttacccatgcatgggaatatgcaagaatacgatagggagtttcgattgctcatgctacccaggaagttatatgaagaatggattctgcctgcctaatcaaaagtccacttttcctgctaggcatgtaataggtgcaagtgttgggttcgtcatcctagtgattgccataacttttgcatgctatgtccaacagagaagaaaactacaacatataaaaaacaattattttcaacagcatggtggtctgatactatttgaagagatgaaatctcaacaaggtcatgcattcaaaatcttctccgaagaagaattgcaacaagcgacaaagaaatttaatgaacaagaaattctaggccaaggaggcaatggaattgtttacaaggggcttctcaagagcaactctgaagtagctgtcaaaaaatgcatgacaattgacgagcaaaagaagaaagagtttggtcccatgcttgtgtacgagttcatcccgaacggtacactcttccatctcatccatgaaaaccatggtaatcacatctctctaatcactcgccttcggattgcccatgagtctgctgaggcgcttgcctacctccactcttgtgcttcaccaccaatcctacatggtgatgtcaagtcatccaacatcctccttgacaacaacttctcagcgaaagtctcagacttcggtgcttctatcttggctccaacggatgagatgcagtttgttacgctagtccaaggaacttgtgggtatcttgacccagagtacatgcaaacatgccaattaacagataagagtgatgagaacaagctcgaggatatgttgaatgatcaaattaagaataacgagaatatggagtttctggaagaaatggcagagttagcaagaaaatgcttagacatgtcttccataaataggccatcaatgaaggaaattggagacgaacttggtaggctaaggaaggtcatggaacaccaatgcgcaagacagaacccagaagagatggagagctttcttggggattcatcttatgtgatcaactcaactgttgagagcacaaaaagtttcagcattgagaagaacgctatgaagcgtctcaaatcagggcgctaa

SEQ ID NO: 166 - protein, 438 aa, Oryza sativa
MAGGMSDGSGAATTAGGVGDGSDAGGGNSNCVDDIKGGYRCKCSHGYEGNPYIKDGCKDINECLDNATYPCMGICKNTIGSFDCSCYPGSYMKNGFCLPNQKSTFPARHVIGASVGFVILVIAITFACYVQQRRKLQHIKNNYFQQHGGLILFEEMKSQQGHAFKIFSEEELQQATKKFNEQEILGQGGNGIVYKGLLKSNSEVAVKKCMTIDEQKKKEFGPMLVYEFIPNGTLFHLIHENHGNHISLITRLRIAHESAEALAYLHSCASPPILHGDVKSSNILLDNNFSAKVSDFGASILAPTDEMQFVTLVQGTCGYLDPEYMQTCQLTDKSDENKLEDMLNDQIKNNENMEFLEEMAELARKCLDMSSINRPSMKEIGDELGRLRKVMEHQCARQNPEEMESFLGDSSYVINSTVESTKSFSIEKNAMKRLKSGR

SEQ ID NO: 167 - DNA, 2271 bp, Oryza sativa
atggccagccgcccgccgcttcttctgcagtactcgtcgctgctgctgctctgccttgccgtctcggcgccgccggccgcagccggcaacgtgccggcgccggtggcggccgtctcgaagccgggctgcccgaccaagtgcggcgccgtggacatcccgttcccgttcggcatcggcgagcactgcgggctcgaggcgccttacacaaactacccgttcaagttcgactgcaagcccgttgacggcaccagcaagcctttcttcaggggtatggaggtgaccaagatctccatggaagacggcaaggcctggatgaagatgaacatatccaagaactgctacaaccagtcgacgggcaccagggaggacaacaccaacacaacatctgtgagcttcagccgctcgcctttctggatatcggacagggataacaagatcatcgtcatcgggtgcgaaacgttttcgtatatgcagatcaataatgtatccaaaacaacacttacttgtgaattggaggttttaacaggttgtgtgccctcatgcagaaacgaccccaaggacggtatatgttccggtgaagcgggttgctgcaaacttgatttccccaatggcacatggtactatagtacttatttcagtaaaagaaataataacagcagtccttgcagcttcataacagtgatggaaaccacaaccttcaacttcaacaaaaattatttcaactccactacattctatgacacatacaatgggttagctaaggtttccctagattggatcataacaatggattcatgtgatcgagtcaaaagaaacactacttcatatgcatgcattagtggaaaaagtcgttgtgttgatgatccaaagggaggttaccgctgcaagtgctctgatggatatgaaggcaatccatacgtcaaggatggatgcaaagatattaatgagtgcctcgacaatgctacttacccttgtccgggaatatgtaagaatacgttggggaatttcacctgctcatgctaccctggaaactatatgatgaatggaatttgcattccaaatcagaagtctggttttcctaaaaatcttgtaataggagcaagtgttggggccgtattactagtgattatagtaacttatgcatgcttcatcagagagaagagaaagctacagtatgtcaaaaggcggtacttccgccaacatggtggtatgttgctattcgaagagataaaatctcaacaaggcatttcattcaaaatcttctcagaagaagaattgcaacaagcaacaaacaagtttgacaaacaacaagtccttggccaaggaggcaatgcaactgtttacaagggacttctcaagggaaacacggaaatagccgtcaaaagatgcatcacaattgatatgaaacaaaagaaagaattcggcaaggaaatgctaatcttgtcccaaaccaaccataggaacgttgtcaaattattgggttgctgcctcgaagtagaagttccgatgcttgtctatgagttcattccaaatggcacattgttctctctcatccacgggaaccacaatcaacacatctccttggatactcgcttacgtattgcacatgaatctgcagaggctcttgcctatttacactcatgggcatcaccaccgatcctccatggcgatgtcaagtcctcaaatatcctcttagacaaagattatgtagcaaaagtttctgacttcggtgcttccatcctagcaccaactgatgagtcgcagttcgtcactctcgttcaaggaacttgtggatacctcgatccagagtacatgcaaacatgccagttaacagataaaagtgatgtatatagctttggagttgttattctagaattgctcacaagaaagaaagcattcaaccttgaaagccctgaagatgagaggagcctagccatgaggtttctatcagccatgaaggaaaaaagactttctgatattttagatgatcaaatcatgacgggagataatttggagtttcttgaagagattgcagagttagcaaagcaatgcttggaaatgtctggtgagaatagaccgttgatgaaggaagttgcagacaagctcgataggttgaggaaggtaatgcaacatccatgggcacaacaaaatcctgaagagatggagagcttacttggggactcttcttacgagatcaacaactcaacggttgagaatacaggaaatttcagcatcaatagtgaacttcagtgtctagaatcaggccgttaa

SEQ ID NO: 168 - protein, 756 aa, Oryza sativa
MASRPPLLLQYSSLLLLCLAVSAPPAAAGNVPAPVAAVSKPGCPTKCGAVDIPFPFGIGEHCGLEAPYTNYPFKFDCKPVDGTSKPFFRGMEVTKISMEDGKAWMKMNISKNCYNQSTGTREDNTNTTSVSFSRSPFWISDRDNKIIVIGCETFSYMQINNVSKTTLTCELEVLTGCVPSCRNDPKDGICSGEAGCCKLDFPNGTWYYSTYFSKRNNNSSPCSFITVMETTTFNFNKNYFNSTTFYDTYNGLAKVSLDWIITMDSCDRVKRNTTSYACISGKSRCVDDPKGGYRCKCSDGYEGNPYVKDGCKDINECLDNATYPCPGICKNTLGNFTCSCYPGNYMMNGICIPNQKSGFPKNLVIGASVGAVLLVIIVTYACFIREKRKLQYVKRRYFRQHGGMLLFEEIKSQQGISFKIFSEEELQQATNKFDKQQVLGQGGNATVYKGLLKGNTEIAVKRCITIDMKQKKEFGKEMLILSQTNHRNVVKLLGCCLEVEVPMLVYEFIPNGTLFSLIHGNHNQHISLDTRLRIAHESAEALAYLHSWASPPILHGDVKSSNILLDKDYVAKVSDFGASILAPTDESQFVTLVQGTCGYLDPEYMQTCQLTDKSDVYSFGVVILELLTRKKAFNLESPEDERSLAMRFLSAMKEKRLSDILDDQIMTGDNLEFLEEIAELAKQCLEMSGENRPLMKEVADKLDRLRKVMQHPWAQQNPEEMESLLGDSSYEINNSTVENTGNFSINSELQCLESGR

SEQ ID NO: 169 - DNA, 1617 bp, Oryza sativa
ttgtacattgacaccaatcttgaacataatagcgcattacagtaaaaccaatctgaacatatagtaggaatcaatcatattattcatgttcattaaaatttaaggttgaaaaccccggaaatgctttcaaatcatcattttggagtaacatcactttggaaaccatgcaggtggaagtattggagttgtcacccttgtgactattgtgacgtgtgcatatctcatccaagaaagaaataagctacacagcataaaacagaagtactttcgacagcatggaggtcgactgctatttgaggagatgaagggtactgcatttaaaatctttacggaagaagaattgcagaaagccactaataatttcgatgaaaagaaaatcctaggtcatggaggacatggcaccgtttacaagggatttctaaacggcaacactgaagtagcaatcaaaagatgcaagacaatcgatgagcaacaaaagaaagaatttggtaaagaaatggtaatcttatcccaagtcaaccacaaaaatattgtcaaactattaggttgttgccttgaagtggaagtcccaatattggtgtatgagtttatcgcaaatggcacactgttccatctcattcatgatggccacggcaggcacatctctatatccacgcgtttacagattgctcaccagtctgctgaagcattggcctaccttcactcatgggcatcgcctccaatcctccacggggacgtcaagtcatccaacattctccttgatggtgacttcacagcgaaggtctctgactttggagcctccatcttatcgccaaccgatgatgcacagttcgtcacgtttgtgcagggaactcgtgggtaccttgacccagagtacatgcaaacatggaaattaacggataagagtgatgtatacagttttggggttgttgtcctagagctactcacgagaaagaaaccattaaattttgacgggctagaggatgagaaaagcctatctgtgaggttcctttctgctgtcaaggagaacaagcttgaggaaatcttggatgatcaaattaagagcgaggagaatatggagattcttgaagagattgctgagttggccagacgatgcttggaaatgtgtggtgagaataggccatcaatgaaggaagttgcagaaaagcttgatagcttgagaaaggttttgcaccatccttgggcactgcacaatcttgaagaggcggagagcttactaggagagtcatcaattgttagctcggaggttgtcagtacgggaaatttcagcattgagaagaaatctttaataggcctagaatcaggaagataatcgctaataaccttgttgtatatcatatcccaggaaattatataggtatactccaaaagtattacatgtataggtaatcgtcatcatatatggaatgattcatacatgttttatatgtgtagctcaaggttgcatcattgttaagatccaaaggtgaggttgttgtttcaattgctattgtagctttacctttcaaaaatctatgtacaatagtaattgatttgatatttgacacacattttctttttatagtttgatcaattctcatactgctaacaaatcac

SEQ ID NO: 170 - protein, 343 aa, Oryza sativa
MKGTAFKIFTEEELQKATNNFDEKKILGHGGHGTVYKGFLNGNTEVAIKRCKTIDEQQKKEFGKEMVILSQVNHKNIVKLLGCCLEVEVPILVYEFIANGTLFHLIHDGHGRHISISTRLQIAHQSAEALAYLHSWASPPILHGDVKSSNILLDGDFTAKVSDFGASILSPTDDAQFVTFVQGTRGYLDPEYMQTWKLTDKSDVYSFGVVVLELLTRKKPLNFDGLEDEKSLSVRFLSAVKENKLEEILDDQIKSEENMEILEEIAELARRCLEMCGENRPSMKEVAEKLDSLRKVLHHPWALHNLEEAESLLGESSIVSSEVVSTGNFSIEKKSLIGLESGR

SEQ ID NO: 171 - DNA, 2603 bp, Oryza sativa
acacactctcctgtctcctccagtctccacacacacacgcaatgactaagcctcttccctccaccattcttctgatctgcgtttcagccatcgggatggtagccgccgacgtccccgtggctggacacccaggctgccagacgaggtgcggggacgtcgacatcccgttccccttcggcatcggcgatcactgcgcaatccaccatggcttcaacatcatctgcaagcctgtcaacggcaccaagaggcctttcaaggggtcgtttgaggtgacgaaaatctctgtgcgcgatgccaaagcctggatgaagatgcggatctcttggtagtgctatgactcggcctcgagcaaaatgaaggaatgggtggatttccaaaacttcacctacatgcccttcaggttctcatacgaggataacaagattttcatcatcggttgcaatacaatggcctacatgagaggtgtttcctatgtcataggttgcttgtccacatgctccgatcaaccaaaaaatggttcttgctctggcgctggctgttgttcggtggatgtcccgccagacctgggttatcttgaggcttacttcaataaagactataactcctcagaaatcagctacagcagttgtggctacgtggtagtgatggaaaaggctgtgtaagtgagtggctggacttctagttttgaactatagcaccacttacattccctcaacaaacttctgggatgactacaacgggactgttccggccgtgatggactggataattacatgggagacatgcgaggaagcgaaaacgaacatgagttcatatgcttgtgttagcaacaatagcgaatgcctcaattcaacgaatgggagaggttatcgctgcaagtgctccaaggggttcgatggcaatccttacgtcaaggacggtcttcttggatgcagaggtctctctgtctctctctctctctccctctctctattcagcaaagtatacaataagaacttatattcacgaaagtttgctttgtttcagatatcaatgaatgtcttgataacactacttatccatgcgctggaatttgtgaaaatacaatcgggagttacaaatgttcttgccctcaaggacaaaatgagctggctcggggtgtctgtgttccagatcagaagattcagaagtcccaagcttgggtgatgcctgttgtaggggcaagtgttggatttgtcatacttgtgatcatggcaacttgttcgtacttgatccgcgagagaagaaagctgcaacacatcaagcagaaatattttaagctacacggtggtctactgctgtttcaagagatgaattcaaatgaaaggaaatcatttacaattttctcagaagcagagttgcagcatgctacaaacaagtttgacaaaaaccaaattcttggccatggtggtcatggcactgtttacaagggacttctcaaggacaacactaaaatagctgtcaagaaatgcatgacaatggatgagcaacacaagaaagaatttggtaaagaaatgctaatcctatcctaaataaaccacataaacattgttaaactattaggatgttgccttgaagtacaagttcctatgctagtatatgaatttatcccaaatggaacgctatccaatctcatccatggcaaccatggccaacacatttctctagttactcgtctacggatcgcccatgaatcagctgaggcactagcctacctccactcctacgcttcaccacccatcatccatggtgatgtcaagtcctccaacatcctcctcgatgttaacttcatggcaaaagtctccgactttggtgcttccatcttagctccactagacaagtcacagcttgtcacgctagtccaagggacttggggttaccttgatccagagtatatgcaaacatgtgaattaacagataagagtgacgtttacagctttggagttgttcttctagaactgctcacaaggaagaacgttttcaaccttgatgctcctggaaatgagaaaagtttgtcaatgaggtttctctcagctatgaaggagaacaagcttgagaatatattggacgatcaaattagcaatgaagagaacatggagtttctcgaagaagttgtagatttagcaaagcaatgcttggcaatgtgtggtgaggatagaccatccatgaagaaagttgcggagaagctcgataggctggttaaggtaatgcaacacccatggacgcaacaaaatcctgaagagttggagagcttgcttggagaatcttcttacattataagctcaggagcctcgagtacaggaaatttcagcatcgagaagaaagttgtcaaggacctagcatcagggcgttaagctggaatctctttgctacccagcatacatcatatcaccatatcataccgcgtcatattgtatcatagttttcacttaccctagaaattcagactcagttatgttcattattaaaaaaattttgtgtaaaaataaaaaaatattgtttgtgtacacctttagtctttatgggactatgtttcatcatatatgagaataagaagcaaatcatacgaagtcaagttaattttc

SEQ ID NO: 172 - protein, 254 aa, Oryza sativa
MLVYEFIPNGTLSNLIHGNHGQHISLVTRLRIAHESAEALAYLHSYASPPIIHGDVKSSNILLDVNFMAKVSDFGASILAPLDKSQLVTLVQGTWGYLDPEYMQTCELTDKSDVYSFGVVLLELLTRKNVFNLDAPGNEKSLSMRFLSAMKENKLENILDDQISNEENMEFLEEVVDLAKQCLAMCGEDRPSMKKVAEKLDRLVKVMQHPWTQQNPEELESLLGESSYIISSGASSTGNFSIEKKVVKDLASGR

SEQ ID NO: 173 - DNA, 2361 bp, Oryza sativa
gtacagtacaaaccacacagacaacgaaatggctaagcttcttctctccgctcttttgatctgcatttcagccatctgggtggtagccgcggccgacgtcccggcaggacgccgaggctgccagacgaggtgcggcaacctcgacatcccgttcccgtttggcatcggcgatcagtgcgcgatccacggtggtttcggcctcgactgcaagaacgacagcggcacttataggacattcattgggccgttcgaggtgactaagatctctgtgccggacgccaaagcctggatgaagatgggaatctcttggcagtgctatgacccggtcacaaaacagatgaatgattcgatggttgggcagaacttcaccaacacgccctatcgattctcatacgaggataacaagattttcgtcatcgggtgcaatacaatggcctacatgagaggtgtttcgtatgtcataggttgcttatccacatgctcggatgaaccaacaaatggttcttgctctggcgctggctgttgttcggtggatgtcccaccagacctaggctatgtcgaggcttatttcaataaagattataacacctctcaaatctggaactacagcaggtgcggctacctggtagtaatggaaaaggctgctttcaggtatagcaccacttacattccctcaataaacttctggaatgactacaacgggactgttccggctgtgatggactgggtaatcagaagggagacatgcgaggaagcgaaaagggacatgagttcatatgcatgtgttagcgacaatagcgactgccataattcaacgaatgggcatggttatctctgcaagtgctccaaggggttcgacggcaatccttacatcaaggatggatgcaaagatatcaacgaatgtcttgataatactacttatccatgcgctggactttgtcaaaatacgatggggggttacgactgttcatgccatcaaggacaacataaggtggaggatgtctgtgttccagatcagaagaatcagaagtcctcttgggagatgcctgttgtaggtgcaagtgttgggtttgtcatacttgttatcatagcaacttgttcgtacctgatccacgagagaagaaagctgcaacacatcaagcagaaatactttaagttacacggtggtctactgctgtttcaagagatgaattcaaatgaaaggaaatcatttacaattttctcagaagcagagttgcagcatgctacaaacaagtttgacaaaaaccaaattcttggccatggaggtcatggcactgtttacaagggacttctcaaggacaacactgaaatagctgtcaagaaatgcatgacaatggatgagcaacacaagaaagaattcggtaaagaaatgctaatcctatcccaaataaaccacataaacattgttaaactactgggatgttgccttgaagtacaagttcctatgctagtgtacgagttcatcccaaatggaacactatgtaatctcatccatggcaaccatggccagaacatttctccagttactcgtctgcggatcgcccatgagtccgctgaggcactagcctacctccactcctacgcttcaccacccatcatccatggtgatgtcaagtcctccaacatcctcctcgatgttaacttcatggcaaaagtctccgactttggtgcttccatcttagctccaataaacaagtcacaacttgtcacgctagtccaagggacttgggaactgctcacaaggaagaacgttttcaaccttgatgctcctgaaaatgagaaaagtttgtcaatgaggtttctctctgctatgaaggagaacaaacttgagaatatattagacgatcaaattagcaataacgagaatatggagtttcttgaagaagttgcggatttagcaaagcaatgcttggcaatgtgtggtgaggatagaccatccatgaaggaagttgcggagaagctcgataggttgattaaggtaatgcaacacccatggacgcaacaaaatcctgaagaattggagagcttgcttggagaatcttcttacattataagctcaggagccttgagtacaagaaatttcagcatcgagaagaaagttgtcaaggacctagcatcagggcgttaagctggaatctctttgccacccagcatacatcatatcaccatgtcgtaccgcgtcgtattgtatcatagttttcacttaccctagaaattcagactcagttatgttcattattaattattttttgtgtaaaaataaaaaaatattgtttgtgtacacctttagtctttatgggactgtgtttcatcatatatgagaataagaagcaatcatac

SEQ ID NO: 174 - protein, 706 aa, Oryza sativa
MAKLLLSALLICISAIWVVAAADVPAGRRGCQTRCGNLDIPFPFGIGDQCAIHGGFGLDCKNDSGTYRTFIGPFEVTKISVPDAKAWMKMGISWQCYDPVTKQMNDSMVGQNFTNTPYRFSYEDNKIFVIGCNTMAYMRGVSYVIGCLSTCSDEPTNGSCSGAGCCSVDVPPDLGYVEAYFNKDYNTSQIWNYSRCGYLVVMEKAAFRYSTTYIPSINFWNDYNGTVPAVMDWVIRRETCEEAKRDMSSYACVSDNSDCHNSTNGHGYLCKCSKGFDGNPYIKDGCKDINECLDNTTYPCAGLCQNTMGGYDCSCHQGQHKVEDVCVPDQKNQKSSWEMPVVGASVGFVILVIIATCSYLIHERRKLQHIKQKYFKLHGGLLLFQEMNSNERKSFTIFSEAELQHATNKFDKNQILGHGGHGTVYKGLLKDNTEIAVKKCMTMDEQHKKEFGKEMLILSQINHINIVKLLGCCLEVQVPMLVYEFIPNGTLCNLIHGNHGQNISPVTRLRIAHESAEALAYLHSYASPPIIHGDVKSSNILLDVNFMAKVSDFGASILAPINKSQLVTLVQGTWELLTRKNVFNLDAPENEKSLSMRFLSAMKENKLENILDDQISNNENMEFLEEVADLAKQCLAMCGEDRPSMKEVAEKLDRLIKVMQHPWTQQNPEELESLLGESSYIISSGALSTRNFSIEKKVVKDLASGR

SEQ ID NO: 175 - DNA, 2998 bp, Oryza sativa
acgggcacaaccaacaaagatgaagttgcagtatacacgggcagttcttgccagccttttttgtgtctgtctgtcggctgtctgggtggcggcagcaacggccgatataccggcagggcaacgccccggttgcccggagaggtgtggcgacgtcgagatcccgttcccgttcggcatcggcaagcactgcgcgatgcagacgaagtatccgtttgatctcgactgcttggacgtgaatggcaccaagaagcctttctacaacaataacgaggttaccaagatttcggtgcaggagggcaaggcatggatgaagttgggcatatccagtcagtgttatgaccacgtgacaggccatatcctgtacgacagcaacgcaacggcagaattcggtgattcacctttctggctatcgaccgaaaacaagatcatcgtcatcggatgtcaaactatggcttatatggagagcaacgcttacgtaattggttgcttctcgacatgtaatggttcaacacctgtgaatggatcttgctccggcggtggctgttgccagatggatgttccaggacacatatatagttatgatggttattttgacgaagattacaatgatagcaaaatatggaggagcagcccttgcagctacatggcggtgatggaggataaggccttccaatttagcaccacttacctcaactccacggtattcaacgacacgtacaaagagggagttccagttgtgttggactgggtcataacattggatacatgtgagaaggctaaaagcaaaaccacttcctacgcttgtgttagtacaaacagcatctgcaatgatgatccgagtggaggttaccgttgtaattgttcacatggatatgaaggaaacccgtatattaaagatggttgtgaagatatcaatgagtgcctcgacaatgttacttatccttgtccggggatatgcaataatacaatggggagtttcacttgctcatgccaccaaggaaactatatggagaatggcacttgcataccaaatcggaagtccggttttcttgcacttcctatagtaggttggttcccctcttccgtaatcactagaactaatgataacgccaaccatttgtgcacaccaatatgagaattgttaatatataaattttgcatgccttactagtcattacacatggctagctcatggatcttccataattccatatcttaggccaatcccaacccaacacactagacatagtttccataaactccacatcataaaaaaaactagtacaagacactgctctttcaatgcaaacaccattgtttcatacttagatttaatgctacttatctcatatgatgtcttggatgttgtgtaaaaaccatgcatgtctcatgcaagacctggtttccttttctttcctcatttattcacttgccacatcatctttcatcctaggtggtagcttatttaatgctatagacaccattctagtcattgggttgggactggccttactagtcattcacacaagcttttatgattgtgtaggcacaagtgttggacttgtcatcctagtgatcaccataacttgtgcatgcttaattcatgatagaagaaagctacagcacatcaaaaatcaatactttcgacggcatggtggcctgctactatatgaagagatgaaatctaaacaaggtcttgcattcaaaatcttctcggaagaagaattgcaacaggcgacaaacaaatttgatgaacatcaagttctaggccaaggaggcaatggaattgtttacaagggacatcttaaggacaacttggaagtagcagtaaaaagatgcatgacaattgatgagcaaaagaaaaaagagtttggcaaagaaatgctaattttatcccaaatcaaccacaaaaacattgttaaactattaggttgttgccttgaagtggaggtccctatattggtctatgaattcatcccaaatgacacactttaccatctcatccatggaaactataatggttggcacatccctctggttactcgcctacggattgcccatgagtctgctgaggcacttgcctacctccactcttgtgcttccccaccaatcctccatggtgacgtcaagtcgtcgaacatcctccttgatagcaacctctcagcaaaagtttcagattttggtgcatctatcctagctccaacagatgagacgcaatttgtcacactagttcaaggaacttgtggataccttgacccagagtacatgcaaacgtgccaattaacagataagagtgatgtatatagctttggagttgttcttctagaacttcttacacgcaagaagccgttcaatcttgatgcgcttgaaaatgagaaatgcctgtctatgaggtttctctctgcaatgaaggagaataagctcagtgatctattggatgatcaaatcaagaataatgagaatatggggtttcttgaagagattgccgagttagcaagacaatgcttggagatgtccggtgtagataggccatcaatgaaggaagtaagagataagcttgataggctgaggaaagtcatcgagcatccatggacacacgataacccagaagaattggagagcttgcttggtgagtcatcatgtgtggtcatctcagaggttgagagtacaggaaattttagcattgaaaggaaagttgtcaagggtttggaatcagggcgttaagcagtactctctctggtatagcttatgtccaatcctattgtgatttatcatagattccttgtagagccaaggaactcttactcatctatgtcaattatttgtgtaaagttgagatcttgtgaaggcaaggtaattgtatctgttagaatatcctcctggtatcactactcttggtagattgggattcaaaacatgtattaactttaagacagatcattcatctctcttgtagatgaaaaggaaagttatacaatagagtgtcaaatttaagaaa

SEQ ID NO: 176 - protein, 457 aa, Oryza sativa
MMSWMLCKNHACLMQDLVSFSFLIYSLATSSFILGGSLFNAIDTILVIGLGLALLVIHTSFYDCVGTSVGLVILVITITCACLIHDRRKLQHIKNQYFRRHGGLLLYEEMKSKQGLAFKIFSEEELQQATNKFDEHQVLGQGGNGIVYKGHLKDNLEVAVKRCMTIDEQKKKEFGKEMLILSQINHKNIVKLLGCCLEVEVPILVYEFIPNDTLYHLIHGNYNGWHIPLVTRLRIAHESAEALAYLHSCASPPILHGDVKSSNILLDSNLSAKVSDFGASILAPTDETQFVTLVQGTCGYLDPEYMQTCQLTDKSDVYSFGVVLLELLTRKKPFNLDALENEKCLSMRFLSAMKENKLSDLLDDQIKNNENMGFLEEIAELARQCLEMSGVDRPSMKEVRDKLDRLRKVIEHPWTHDNPEELESLLGESSCVVISEVESTGNFSIERKVVKGLESGR

SEQ ID NO: 177 - DNA, 2475 bp, Oryza sativa
gcagcatcacacgtactcagaattcagaaacacacaaccaccaagagagaattaaccaaatgaccaagcttctccactccgcctgccttctcatctgcatttcaggcgccatcgggttggccgcggctgctgccggacacccaggctgccagacgaggtgcggggacgtcgacatcccgttccccttcggcatcggcgatcactgcgcgattcacgagggttttcggctcgagtgcgacaacgccacgaaaggcaccagcaatcagaagcctttctggggggacttcgaggtgatcaagatctccatggaagacggcaaggtctgggtgaaggcgtacatgtccaggcagtgctacgaccaatccacgggcggtatgtcatacagcgacgcatcggcgaatttgagtggttcatctttctggttatcggacacggataacaaaattaccgtgatcggatgcaagactctcgcctacatgacgaccgattcttatgtaatcgggtgttcgtcagcatgcgacaacaaagtgaacaaactaactcccaagaatggttcatgctctggcgctggctgctgccaggcaaatgttcctaagagcatacagtactaccagggttatttcaacgaaggctacaacaccactaaaatatggatgagcagcccttgcagctacatggcagtgatggaaaccgcagcattcaactttagcacaagttacctcacatccagcgtattttatgacacgtacaaggggggagttccggttgtctacgactgggccataacatcaaaaacatgtacagaatctagaagaaacaagacttcctacgcatgtattagtaacaacagtcagtgcattgacaacctgacgaatgcacaaggttaccgctgcaagtgctccaatggatatgaaggcaacccgtacataaaggatggttgcaaagatattgatgagtgcctcaacaatgctacttacccttgcaaggggatatgcaccaacacgttggggaatttcacctgctcatgctccccaggaagttatatgatgaatggagattgtatgccaaagaagaaactacgttttgactcagtgcctgtggtagtaggcgcaagtatcatatctgttgtcctggtgattaccataatgtgtgcttacttgatcaaagagagaagaaagcaacagctcatcaaacaacattacttccgacagcatggtggtctgctgttatttgaagagatgaaatcgcaataaggtgttgcattcaaaatcttctcacatgaagaattacaggaagcaacaaataggttcaatgaacaacagattcttgggcaaggaggccatggaactgtttacaaggggcttctgaagggcaacatggaagtagctgtcaaaagatgcatgacaatcaatgagcatcagaagaaagaatttggtaaagaaatgctaattttatctcaaatcaaccacaaaaatattgtcaaactattaggttgttgtcttgaagtagaggtccctatgctagtatacgagttcatcccgaacggcacgcttttcgatctcatccatggtaaccatggtcagcagatctccctggccactcgtcttcagattgcccatgagtcagctgaggcacttacttatctccattcatgtgcttcaccaccaatccttcatggtgacatcaaatcatccaacatcctccttgatagaaacctgatagcaaaggtttcagattttggtgcttccattctagcaccaacagatgagtcacagtttgtcacactggttcaaggaacttgtggatatcttgacccagagtacatgcagttgtgtcaattaacagataagagtgacgtatatagcttcggagttgttctcgtagagcttctcacatgccagaaagcgttcaacctcaatgcacctgaacatgagaaaagcctatcgatgaggtttctcaatgcaatgaagaataacaagcttgcagatatattagatgaccagatcaagaatagtgagaatatgccatttctcgaagagattgcagagttggcagcacaatgcttggagatgtctggtgtgaataggccatcaatgaagcacattgcagataatcttgacaggctgagaaaggttatgcaacatccatgggcagaacagaattcagaagagttggagagtttgcttggagaatcgtccatggtcagctcaaggtataccagtacaggaaatttcagcatagagagaaaaggtgtcatggagctagattcagggaggtagtagctatactttttttttcaaaatcttggtgggcaatgtcagtattatctacttaaaataatcatatcacagatcttattacagtaaatatgcaatatcatattgttggcaaaattacttgcattgtatgtaggacaacaaagtaatgttggcggctgctcaaggaataccctcaacaatcttggtgttagtgtcg

SEQ ID NO: 178 - protein, 397 aa, Oryza sativa
MTKLLHSACLLICISGAIGLAAAAAGHPGCQTRCGDVDIPFPFGIGDHCAIHEGFRLECDNATKGTSNQKPFWGDFEVIKISMEDGKVWVKAYMSRQCYDQSTGGMSYSDASANLSGSSFWLSDTDNKITVIGCKTLAYMTTDSYVIGCSSACDNKVNKLTPKNGSCSGAGCCQANVPKSIQYYQGYFNEGYNTTKIWMSSPCSYMAVMETAAFNFSTSYLTSSVFYDTYKGGVPVVYDWAITSKTCTESRRNKTSYACISNNSQCIDNLTNAQGYRCKCSNGYEGNPYIKDGCKDIDECLNNATYPCKGICTNTLGNFTCSCSPGSYMMNGDCMPKKKLRFDSVPVVVGASIISVVLVITIMCAYLIKERRKQQLIKQHYFRQHGGLLLFEEMKSQ

SEQ ID NO: 179 - DNA, 1914 bp, Oryza sativa
atgccaggaaactatgtcgtcgtcgtcgtccttagcagcctggctgcactagtgctgctgctgccgccgttgtttgctgctgtggatgatgggatgaggagcggcggcaagtgcaccaacagctgcggcaacgtcggcttcgagtacccgttcggcgtggaggacgggtgctaccgcggcggcggcttcaacctcacctgcaaccacacgtaccagtcgcccaggctgttcctcggcgatggcagcgtgcaggtgctcgacatctccgtgccacacgggtgggcgctgatcaacaacaccggcatggtgttcaactccaccgagacgcgggtcgtcctcaacagaacatgggatcagctggtgggaggcccctactccttatcgggctcaaacaagatagctctggtaggctgcaatgccagggttgatcttcgcgcccgggtaaaagtaaaacacggcggccgcggcggcgacgacgatactggaagtaatctgatcagctcatgcactgccgtctgcccattagacctcgaggacatgactccggttttcgccatcggttctggcggtagcagcgcagcgtgctccggggttggctgctgccaagcagacatcaacttagacatcccctcttcgtacacaatccagatccacaacttgcaggagctgggaggctccatcagtccaacggatctagtgttcatatcgaaagaggagttcagctacaccaatgacatggctttcggcaacaacatcccacaggcgctcccagccctgctagattggtatataagcagtgacccatcagagtgtacgtacgaatcagcccccgattgtctcagcgccaacagcttctgccacgcttacgaccttgggtacaagtgccactgctccgatggttaccaaggaaatccatacattcgcggtggatgccatgatatcgatgaatgcaagtccccccaagattattcatgttacggcaactgcaacaacacgccaggatcgcacatttgcgactgtcctcgtggctacgagcgcaatgcttccacaccaaatggatgcaaagacatcgatgagtgtgggcaccgcgaaacttaccagtgctatggagagtgcattaatttccctggaggtttcgattgcctctgctaccatggaactgacggggatcccagaaaagaagggggatgccttccggtgaagcatcatttgtcagctcgagacttaggtctattcattgggcttggggttggcagtggcacaattcttttgctcattgcagttggtgctcccttcctatcaaggaaaatgaaggaccgaatgaggatagctgttgaagttgctagagctttaacttatttgcattcagctgctacagtaccgttaatagcaaaggtatcggactttggagcttcacgatatgtccctatcaatcaaactgaagtgactaatgctgtccagggaacgatcggttacttagatcccgagtattattatacaggccatttaatggacaaaagtgacgtttttagctttggagttcttgtaatagaacttcttactcggaaaagacccacctataggactgatcagggtgatagtttagttttgcattttgcatcactactgagacaaggacagctggttgggatactggatcctcaagtcctgaccgagggaggtggagaagtcatggaagtagcattacttgctgggatgtgcactagaatgactggacaagatcgccctactatgagagaagtcgagatgggactggaaaacttgcgagttagtaagaaacttgcttcacatgatacagcatcaagtagccttgtatctcagatggcagagcatcgcatgatagcgacaggggacatggaggaatcaagcatacagtacagtatggaaaaatag

SEQ ID NO: 180 - protein, 637 aa, Oryza sativa
MPGNYVVVVVLSSLAALVLLLPPLFAAVDDGMRSGGKCTNSCGNVGFEYPFGVEDGCYRGGGFNLTCNHTYQSPRLFLGDGSVQVLDISVPHGWALINNTGMVFNSTETRVVLNRTWDQLVGGPYSLSGSNKIALVGCNARVDLRARVKVKHGGRGGDDDTGSNLISSCTAVCPLDLEDMTPVFAIGSGGSSAACSGVGCCQADINLDIPSSYTIQIHNLQELGGSISPTDLVFISKEEFSYTNDMAFGNNIPQALPALLDWYISSDPSECTYESAPDCLSANSFCHAYDLGYKCHCSDGYQGNPYIRGGCHDIDECKSPQDYSCYGNCNNTPGSHICDCPRGYERNASTPNGCKDIDECGHRETYQCYGECINFPGGFDCLCYHGTDGDPRKEGGCLPVKHHLSARDLGLFIGLGVGSGTILLLIAVGAPFLSRKMKDRMRIAVEVARALTYLHSAATVPLIAKVSDFGASRYVPINQTEVTNAVQGTIGYLDPEYYYTGHLMDKSDVFSFGVLVIELLTRKRPTYRTDQGDSLVLHFASLLRQGQLVGILDPQVLTEGGGEVMEVALLAGMCTRMTGQDRPTMREVEMGLENLRVSKKLASHDTASSSLVSQMAEHRMIATGDMEESSIQYSMEK

SEQ ID NO: 181 - DNA, 3121 bp, Oryza sativa
agtatttcttctgctgatcgagccactgaatcgatcagctccatggcgccctctcctgttatccttgttatggctgcactgtttctccaagctgcaacaatggcggcaacaaccgcgctaaccgtatcgctgccgggctgcccgagctcgtgcggcagcatggtcatcccctacccgttcggcgtcggcgccggctgccacctcgccggcttcgccgtcacctgcaaccgctcctaccacccaccgaagctcttcctgcgcgacgccgacgccgctgaggtgctcgagatatccctcctaaactccacggtgatcgtcagcagcgccgtccggtacgacgccgccaaaggcgagggcgcgtggggccgcggcctcgccggcgcgttccgcctcagggagcggcggaaccggctcgtcgtcgtggggtgcaacctgcaggccgtcctcctggacggcgacgacatcgccgccgcgtgcaccaccatctgcggcggcgccggcgccacctggccagcagcggccgacggcgagctcgcggattactcgtgcgcgggcgttggctgctgccaggcttccatctacctaggcctcacgtcgtacggcgttcggctgtcgccgttcggcacaagcaccgggccgccgccgccgccgccgacctcctccgcctcgtcgtctaaccaatcggattcggctctcgtgttcgtcgcggacaacgagtggttcggcgggaacgcgagtaagctcggatcagcagcagcgacgatgcgaccgggcggcggcggcatgccggtggcgctggccgtgctcgactgggcgatcgggaagtcggggtgtccgccgcatgggcccgacgacacggcctgtagcagcagcaacagctactgccgcaactctaccagcacctcgcttggcggctactcgtgccagtgcgacaacgggtaccaaggcaatccgtacgttgcaaatggatgtcaaggtaatttgttactccctacttccctaaatgtttgatgccgttgactttttaaaacatgtttaaccgttcatcttatttaaaaacttttgtgaaatatgtaaaactatatatatacataaaagtatatttaacaatgagtcaaatggtaggaaaaaattaataattgcttaatttttttgaataagacgaacgatcaaacatatttcaaaaagtcaacggcgtcaaacatttagggatggagggagtataagggtgtaaccatgtaagtggagaaacaactgagggtcttctgattagcttcacaaggtggtgggctagctgttctgggttcgatgcctcacccttctatttagtttgatattaaatcatttcctaatattttagcttataagtgtgtttaacggattagtcatttacacttgaagttgcataagtatagcctctcatcgtttgcttgctagattatgagccgcggctaaaatttaaaacctaattttaaagttgattttagttttcttattatagtcaatcttttgccgttaaaattttaaaccgctattaatagttttatttataaattatttttgttcgtttagtatatttttctatggcttaccaaccatagttcaaatgattagtggaatttagaacagaatggtacaaaatttttctaaattctccctttcagatatcgacgagtgcgctctgccagaagaatatccctgctacggtgaatgcacaaacaagccaggatcgttttcgtgcatgtgtccgggtgggacgcacggtgatgctatgaacgaaggaggatgtgaaccaacgactctccttgtggcgataggaggaaccatcggcataggaattccatccgtgttcgtgataggcatggcaatgacgaacatgatcaaggcacggagggccaagaaactgagagccgtattcttcaagcagaaccggggtttactgctgctgcaacttgttgataaggtgattgctgaaaggatggtgtttaccttggaagagctcgaaaaggcaacaaatcgattcgacgagatgagaaagctcggcagcggcggccatggcactgtctacaaaggcaccttgccagacagacgtgtcgttgccatcaagaaatcgaatattacggttcgtaaggagatcgatgatttcataaacgaagttgtcattctttcgcagatcaaccatcggaatgttgtgcggttattcggatgttgccttgaaacacaggttccactactggtctacgagttcatatcgaacggcactctttccgaccatctccatgttgaaggccctacattgttgtcatggaaaaatagattgaggattgctcttgaagctgcaagcgctttagcctacttacattcatccgcttcagtatcaataattcatagggatgttaagtctgctaacatattgcttgatggtcgcttaacagcaaaagtttcggactttggagcctctcgaggcattccggttgatcaaggtggtgtgacaacagtgatccaaggcacatttggatatcttgatcctgaatactatcaaacaagtagattgaccgataagagtgatgtgtacagttttggtgtcatactcgtggagatgctcacaaggaagaagcctactgtttttgaatcatcagataatgtcagcctaattgcactttttaatttgctaatggtacaggacaacatctacgagatattagaccctcaggtaatttcggagggcatggaaaatgtgaaagaagtcgcggcgctagcatcggcatgcctaagattgaagggggaagagaggccaacaatgaggcaagtggagataaggctggaaaggctgttaggcggtgacattttgcaagggctttcagctgagctgcactgtctaccacctcaactgagcaataccgacactactagcaagctatacaacatggagcgggattttttgctatcgtcgagcttcccacggtgatcttactacatgtgtacaaactacatacaactttaccacttaaagttgtttagcatgtgtttgatttgaagatgaggtgagatgtgttagatgaattgggatcacctgcagtggctatagaaagtgatatccgaaaccttcctgaatcaactc

SEQ ID NO: 182 - protein, 445 aa, Oryza sativa
MVQNFSKFSLSDIDECALPEEYPCYGECTNKPGSFSCMCPGGTHGDAMNEGGCEPTTLLVAIGGTIGIGIPSVFVIGMAMTNMIKARRAKKLRAVFFKQNRGLLLLQLVDKVIAERMVFTLEELEKATNRFDEMRKLGSGGHGTVYKGTLPDRRVVAIKKSNITVRKEIDDFINEVVILSQINHRNVVRLFGCCLETQVPLLVYEFISNGTLSDHLHVEGPTLLSWKNRLRIALEAASALAYLHSSASVSIIHRDVKSANILLDGRLTAKVSDFGASRGIPVDQGGVTTVIQGTFGYLDPEYYQTSRLTDKSDVYSFGVILVEMLTRKKPTVFESSDNVSLIALFNLLMVQDNIYEILDPQVISEGMENVKEVAALASACLRLKGEERPTMRQVEIRLERLLGGDILQGLSAELHCLPPQLSNTDTTSKLYNMERDFLLSSSFPR

SEQ ID NO: 183 - DNA, 2351 bp, Oryza sativa
agtagtgtggtaggcgtagaagaaaatggggtaggtgtgtagaaggagcgattgtgccagcgatgacgatgcttccggcgacggcggcggcgctgctggtgctggtgctgcagctgatgtggtcggcggaagcgcaggtggcggtgggctcagggccgccggcgggctgcccggacaggtgcggcaacgtgagcgtgccgttcccgtttggcatccgcgacgggtgctccctcgagggattcggcctcacctgcaacaccacgagcaatcccccgcgcctgatgatcggcaacagcacactgcaagtcgtcaacatctcgctggccaactccacgctgcgcgccgtcgacatcgacggcgccgtgaacatcacctacgggcagatcgacggcaacggcacgtgggtcggcgtcgtcgcgagcccgtacatcgtgaacgagaccctgaaccagctcctcgtcacggggtgcaacatccaggtaacccttgtcggcagcggcgggaacgtcatctccggctgctcttccttctgctccatcaacgacatgtacacgggtggcgtgttcagaagcccaggcaacaagtgcgcgggcatcggttgctgccagcagcaggtctccatcggccgcccctcctaccgcgtggaattgacgaacctggacagggatcgtgagttcagcggtagggtgcccgaagcggtgcgcatcgccgagctgggctggttcgacggcctcgccgccgacctgctcaacgtgtcgttggcggacacctcgcgccggaacccggttccggtggtgctggattgggcggtggcgtccaccggcctggatgtcacgctcaacgccgggctgaacaaacaggctgccaataactggtcctgccccacggccgcctcgggcaggaagagcgcgtgcataagcagcaacagcttctgccgcaacatcgccgacaactaccgaagcggttacgtctgccgttgtgacaaggggtacgacgggaacccgtacgtcgccggcggatgccaagacatcaacgagtgcgagcgggcgaaggagaacggctgcttcggcgagtgcaccaacacgccgggagccttcttgtgcaggtgcccgcacggtgcccgtggtaacgccaccattccaaatggctgcaccaaatccaatctaggtttaacaattggagttggaattggtagtggtgccggcctttttatcctggcacttggtgctgtctttttaacacgtaggattaaacaacggagagcaagaacactgagacagaagttcttcaaacagaaccgtggccatttgttgcaacaattggtatctcaaaaggccgacattgcggaaagaatgatcatccccttggcagaactagaaaaggccacaaacaactttgacgaatcgcgtgagcttggaggaggaggacatggcaccgtatacaaaggtattctctcaaaccttcatgttgtcgcaatcaagaaatcaaatgtgacagtccaaagggagattgatgagttcataaacgagaccgaagtgccattgttggtttatgaattcatatcaaatggtacactttatcatcatcttcatgttgaaggaccaacatcgttgccatgggaagataggctcagaattgctactgaaacagctagatccctcacttaccttcactctgccgtgtcatttcctataatccatagggatatcaagtcccataatatcctattggatggctcactaacagcaaaagtctcagactttggagcttcaaggtgcatcccaactgaacaaaatggggttacaactgctattcaaggaacactaggatacctagaccccatatattactacacaggacgtctcacagataagagtgatatttatagcttcggcgttgttttaatggagttgcttactaggaaaaaaccatattcatacagatcggctgaggatgagagccttgttgcacatttcagtaccctacatgcacagggcaacttgggtgacatacttgatgcgcaggttatagaggagggaacaaaggaagttaatgatgtagccacattagctgtggcatgtgccaagttgaaagcagaagagcgaccgactatgagacaggtggaaatgacactcgagagcattcggcaagaagtactgcatagtgtgagcacaaagaaatctaaggagcttcacgtctcatggaaccatgcaataagtgaggggagtatcttctaccaagctgtcgacacttcaattgtaatagttagcgatgttggttccagcgataacttgtgcgacggcgctgtgatcggcagaaacagatttccggggacgcaatgccggcagtga

SEQ ID NO: 184 - protein, 762 aa, Oryza sativa
MTMLPATAAALLVLVLQLMWSAEAQVAVGSGPPAGCPDRCGNVSVPFPFGIRDGCSLEGFGLTCNTTSNPPRLMIGNSTLQVVNISLANSTLRAVDIDGAVNITYGQIDGNGTWVGVVASPYIVNETLNQLLVTGCNIQVTLVGSGGNVISGCSSFCSINDMYTGGVFRSPGNKCAGIGCCQQQVSIGRPSYRVELTNLDRDREFSGRVPEAVRIAELGWFDGLAADLLNVSLADTSRRNPVPVVLDWAVASTGLDVTLNAGLNKQAANNWSCPTAASGRKSACISSNSFCRNIADNYRSGYVCRCDKGYDGNPYVAGGCQDINECERAKENGCFGECTNTPGAFLCRCPHGARGNATIPNGCTKSNLGLTIGVGIGSGAGLFILALGAVFLTRRIKQRRARTLRQKFFKQNRGHLLQQLVSQKADIAERMIIPLAELEKATNNFDESRELGGGGHGTVYKGILSNLHVVAIKKSNVTVQREIDEFINETEVPLLVYEFISNGTLYHHLHVEGPTSLPWEDRLRIATETARSLTYLHSAVSFPIIHRDIKSHNILLDGSLTAKVSDFGASRCIPTEQNGVTTAIQGTLGYLDPIYYYTGRLTDKSDIYSFGVVLMELLTRKKPYSYRSAEDESLVAHFSTLHAQGNLGDILDAQVIEEGTKEVNDVATLAVACAKLKAEERPTMRQVEMTLESIRQEVLHSVSTKKSKELHVSWNHAISEGSIFYQAVDTSIVIVSDVGSSDNLCDGAVIGRNRFPGTQCRQ

SEQ ID NO: 185 - DNA, 1869 bp, Oryza sativa
atggctaccagccccagtgccctgcacatgcaggcggttgccttaggcgccgccgtgtttctcctctcctgccttgcgtcggctcagcagccgccggcgccgggctgcctcgacaagtgcggggacatcaacatcacctatcccttcggcgtcggcggcgcccattgcttccgcgataaaagcttccagctcgagtgcaacgtcgtcgtcaacaattcccatccacgcctcatcatgcctgcctataatcagcagctgctcagcctgtcccccgacggcgaggcgctcgccgccctcgacatccaacatgaggcctactactacaactgcaacgcgagccatcccaccgccagcgccagcagccagccgaacaacatgacgtttgcgaccctcaacaaaagcactgtctaccgcttccccgtgtccacgtaccgcttcaacgccaccaccaacagctacgtcgtgcccgtcgcgctggactgggccatccgggacgtccacaactgcagcgccgccaagctcaacgccaccaactacgcgtgccggagcgccaacagcaaatgctccgacaccaccgatggcgccgggtaccggtgcagatgttccgggggctacgagggcaacccctacctccatgccggatgccaaggattaaccacgggatcaattattggtatcggagttggcagtggcgctgggctattggtcatggcactcggtgcagcctttttaacacgtaacattaagaatcggaaagcaagaatactgagacagaaattcttcaaacagaaccgtgggcatttgttggaacaattggtatctcaaaacgctgatattgctgaaagaatgatcatccccttggcagaactggagaaggcaacaaacaattttgatgaatcacgggagcttggaggagggggacatggcaccgtgtataaagggattttatcggatcttcatgttgttgcaatcaaaaaatcaaaagttgcagtccaaagggagattgatgaattcataaacgaggtagccattctctcacaaatcaaccatcgtaatgtggtcaaactttttggatgttgcctcgagacagaagtaccattgttggtctatgaattcatatcaaatggtaccctttacgaccatcttcatgtggaaggacaaccatcattgccatgggaatataggctcagaattgcaaccgaaaccgctagagcacttgcctaccttcactcggcagtatcgttccctataatccacagggatatcaagtcccataacatcctattagatgtctcactaacaacaaaagtgtcagattttggagcttcaaggtgcattcctgctgaacaaaatggggtcacaaccgctattcaaggaacactaggatacctagaccccatgtactactacacaggacgtctcacagagaaaagtgatgtttttagcttcggtgttgttctaatagagctacttaccaggaagaaaccatactcatacagatcgcctcaggatgatagtcttgttgcacatttcactgccctactcacacatgacaacttgagtgacatacttgatcctcaggtgaaggaagagggaggcaaagaggtgaatgaagtagccgtgttagccgtggcatgtgtaaagttgaaagcagatgaacgaccgactatgaggcaggtggagatgacgcttgaaactgttcgatcatcgttgctgcggcaagaactggtacctagtgtggccgcggaagaatccaaggagaaacatgtctcatggagctatccggtaagcgagggcacaagcatagagtcgagtaggcaatatagtaatgatgaagaatatttgttgtcatcgaggtaccctcgatag

SEQ ID NO: 186 - protein, 622 aa, Oryza sativa
MATSPSALHMQAVALGAAVFLLSCLASAQQPPAPGCLDKCGDINITYPFGVGGAHCFRDKSFQLECNVVVNNSHPRLIMPAYNQQLLSLSPDGEALAALDIQHEAYYYNCNASHPTASASSQPNNMTFATLNKSTVYRFPVSTYRFNATTNSYVVPVALDWAIRDVHNCSAAKLNATNYACRSANSKCSDTTDGAGYRCRCSGGYEGNPYLHAGCQGLTTGSIIGIGVGSGAGLLVMALGAAFLTRNIKNRKARILRQKFFKQNRGHLLEQLVSQNADIAERMIIPLAELEKATNNFDESRELGGGGHGTVYKGILSDLHVVAIKKSKVAVQREIDEFINEVAILSQINHRNVVKLFGCCLETEVPLLVYEFISNGTLYDHLHVEGQPSLPWEYRLRIATETARALAYLHSAVSFPIIHRDIKSHNILLDVSLTTKVSDFGASRCIPAEQNGVTTAIQGTLGYLDPMYYYTGRLTEKSDVFSFGVVLIELLTRKKPYSYRSPQDDSLVAHFTALLTHDNLSDILDPQVKEEGGKEVNEVAVLAVACVKLKADERPTMRQVEMTLETVRSSLLRQELVPSVAAEESKEKHVSWSYPVSEGTSIESSRQYSNDEEYLLSSRYPR

SEQ ID NO: 187 - DNA, 2313 bp, Oryza sativa
atggcggtcgccttagctatattgctcgtcggccttgcgccggcgacaccattgtcgtcggctcagcagccgccgggatgcccctcaacgtgcgggaacatcagcatcccctaccccttcggcatcggcgccggctgcgcccgcgacgagggcttccagctcgagtgcaaccacacctcctcacccccactcctcatcgtgtccaactctaccggcggccggcaccggcaacagctgctgagcctgtccctcgccgacggcgaggcccgcaccttcctcaccgcgaaacggcggtgctacaacagcagcacgggggacatggtgagcgagaacgatcagaacgccaccgagatgtccctctccggcacgccctaccgtttctccaggtcgaggaaccgcctcgtcgcgctcggctgccccaacctcgcctacctggtcgacggcaggggctcctacatcagcagctgcacgtccatctgccggacgccggagtcggtcgccgccggctccacggtgggcttcaccggcgaggggtgctgccagagcagcataccctacagcgtcgacgtctacaagcccgacatcatcggcttcaagcaaggccaagctggggactccgttctgctgaacagcacggcggcttcttccatcttgcagagcagcacggtttgccggtacatgtacctggcggaggacaggtggatcgacgccgcgtaccgcgacggcgccgtcgacttcaaccgcaccgacgacttcgccgtgcacgtcgtgctcgactgggccgtccggaacgccggcaactgcagcgccgccaggcgcaacctcgccgcggccaactacgcgtgccggagcgccgacagcgtgtgcgtcgacaccggtgacggcgacgggtaccggtgcaactgctccaagggctacgagggcaacccctaccacgatggcgggtgcaaagacatcaacgagtgcgagcgggcaaaggagtacccgtgcttcggcgtgtgcatcaacacgctgggatcgtaccagtgcagctgcccgccgggtactagtggcaacgcgaccattcaaactggctgcgttaaaactaatcaagcattaaccacgggatcaattattggcattggagttggtagtggcgctgggattttggtcatggctctcggtgcaacctttttaacacataggattaagaatcggagagcaagaatgctgagacagaagttcttcaaacagaaccgtggccatttgttggaacagttggtatctcaaaaggctgatattgctgaaaggatgatcatccctttggcagaactggagaaggccacaaacaattttgatgaatcgcgtaagcttggaggaggagggcatggcactgtgtacaaagggattttatcggatcttcacgttgttgcgatcaagaaatcaaaggtagcagtccaaagggagattgatgagttcataaacgaggtagccattctctcacaaatcaaccatcgtaatgtggtcaaactttttggatgttgcctcgagacagaagtgccattgttggtctatgaatttatatcaaatggtaccctttatgaccatcttcatgttgaaggaccaacatcattgccatgggaatataggcttagaattacaaccgaaaccgctagagcacttgcctaccttcactcggcagtgtcattccctataatccacagggatatcaagtcccataacatcttattagatggctcgctaacaacaaaagtgtcagactttggagcttcaaggtgtattcctgctgaacaaaatggggtcacaaccgcaattcaaggaacactaggatacctagaccccatgtactactacacaggacgtctcacagagaaaagtgatgtttttagtttcggtgttgttctaatagagctacttaccaggaagaaaccatactcatatagatcgcctgaggatgatagtcttgttgcacatttcactgccctactcacacatggcaacttgggtgacatacttgatcctcagatgaatgaagagggaggtaaagaggttaaagaagtagccatgttagccgtggcatgtgtcaagttgaaagcagatgaacgacctactatgaggcaggtggagatgacacttgaaactattcgatcgtcatcactacaacaagaagtggtacctagtgtggccgcggaggaatccaaggagaaacatgtctcatggagctatccggtatgtgagggcacaagcatagagtcgagtagacaatatagctatgaggaagagaatttattgtcatcgaggtaccctcgatag

SEQ ID NO: 188 - protein, 770 aa, Oryza sativa
MAVALAILLVGLAPATPLSSAQQPPGCPSTCGNISIPYPFGIGAGCARDEGFQLECNHTSSPPLLIVSNSTGGRHRQQLLSLSLADGEARTFLTAKRRCYNSSTGDMVSENDQNATEMSLSGTPYRFSRSRNRLVALGCPNLAYLVDGRGSYISSCTSICRTPESVAAGSTVGFTGEGCCQSSIPYSVDVYKPDIIGFKQGQAGDSVLLNSTAASSILQSSTVCRYMYLAEDRWIDAAYRDGAVDFNRTDDFAVHVVLDWAVRNAGNCSAARRNLAAANYACRSADSVCVDTGDGDGYRCNCSKGYEGNPYHDGGCKDINECERAKEYPCFGVCINTLGSYQCSCPPGTSGNATIQTGCVKTNQALTTGSIIGIGVGSGAGILVMALGATFLTHRIKNRRARMLRQKFFKQNRGHLLEQLVSQKADIAERMIIPLAELEKATNNFDESRKLGGGGHGTVYKGILSDLHVVAIKKSKVAVQREIDEFINEVAILSQINHRNVVKLFGCCLETEVPLLVYEFISNGTLYDHLHVEGPTSLPWEYRLRITTETARALAYLHSAVSFPIIHRDIKSHNILLDGSLTTKVSDFGASRCIPAEQNGVTTAIQGTLGYLDPMYYYTGRLTEKSDVFSFGVVLIELLTRKKPYSYRSPEDDSLVAHFTALLTHGNLGDILDPQMNEEGGKEVKEVAMLAVACVKLKADERPTMRQVEMTLETIRSSSLQQEVVPSVAAEESKEKHVSWSYPVCEGTSIESSRQYSYEEENLLSSRYPR

SEQ ID NO: 189 - DNA, 2571 bp, Oryza sativa
atctgaattaggtgtagtagtagtagaagaagaagaagagagattaattaagtggcaggctgccagcgatggtgatgttgtttccatcgccggcgacggcggcgctgctggtgctggtggtgctgctgctgcagctgcagctttggtcggcggaagcgcaggtggcggtgggctcagggccgccggcgggctgcccggacaggtgcggcaacgtgagcgtgccgttcccgtttggcatccgcaccggctgctccctcgagggattcggcctcacctgcaacaccacgagcaatcccccgcggctgatgatcggcaacagcaccctgcaagtcgtcagcatctcgctggccaactccacgctgcgcgccgtcgacatcgccggcgccgtgaacatcacgtacgacgtcgtcagcggaaccaccggcaacggcacgtggggcggcgtcgccgcgacctcaaccaacccgtacgtcgtctccggggaactcaaccagctcctcgtcacggcgtgcaacattcaggtaacccttgtcggcagcggcggcaacgtcatcaccggctgctcttccttctgctccatcaacgacaagtacacgggtggcgtgttcagaagccccggcaacaagtgcgcgggcatcagttgctgccagacgcccatctccatcggccgcccgtcctacagcgtgaaagtgacgatcatggataacgagtacagaggtgaggtgcccgaagcgatccgcatcgccgagctaggatggttcgacggcctcgccgccaacctgctcaagaagcctgcagcgaatgacacctcgctccggacgccggtcccggtggtgctggagtgggcggtggcatccaccggcctggatgtcacgctcgacgccgggctgaacaaccaggctgccaataactggtcctgccccacgcccggcgaggcaagaaggagcgcgtgcataagcaacaacagctactgccacaacgtcaccgacaactaccgaagcggttacgtctgccgttgtgacgacgggtacgacgggaacccgtacgtcgccggcggatgccaggacatcaacgaatgcgagcggccaaaggagcacggctgcttcggcgagtgcaccaacacgccgggagccttcttgtgcagatgcccgcacggtgcccgtggtaactacagcattccaaatggctgcaccaaatccaatctaggtttaactattggagttggaattggtagtggtgccggcctttttatcctggcacttggtgctgtctttttaacacgtaagattaaacaacggagagcaagaacactaagacagaagttcttcaaacagaaccgtggccatttgttgcaacaattggtatctcaaaaggccgacattgctgaaaggatgatcatccccttggcagaactagaaaaggccacaaataactttgacaattcgcgtgagcttggaggaggaggacatggcaccgtatacaaaggtattctctcagaccttcatgtcgtcgcaatcaagaaatcaaatgtgacagtccaaagggagattgatgagttcataaacgaggtagccattctatcacaaatcaaccaccgcaatgtggtgaaactttttggatgttgtcttgagaccgaagtgccattgttggtttatgaattcatatcaaatggtacgctttatcaccatcttcatgttgaaggaccaacatcattgccatgggaagataggctcagaattgctactgaaacagctagatcccttgcttaccttcactctgctgtgtcattccctataatccacagggatatcaagtcccataatatcctattggatggctcactaacgacaaaagtctcagactttggagcttcaaggtgtatcccagctgaacaaaatggggttacaactgctattcaaggaacactaggatacctagatcccatgtactactacacaggacgtctcacggagaagagtgatatttatagctttggagttgttttaatggagttgcttactaggaaaaaaccacactcatatagatcggctgaggatgagagccttgttgcacatttcactaccctacatgcacatggcaacttgggtgacatatttgatgcgcaggttatggaggaggggaaaaaggaagttaatgaagtagccgtattagctgtggcatgtgtcaagttaaaagcagaagagcgaccgactatgagacaggtggaaatgacactcgagagcattcgatcatcatcactgcagcaagaagtattgcatagtgttagcacaaagaaatctaaggagcttcatgtctcatggagccatgcaataagtgagggtacaagcttagattcaactaggcaatatagtctcgaagaagagaacttgttatcatcaaggtatcctcgatagcgattttttaatttttcttgtgtgagtttggatcgatatagaaagcttatgttgtcctcgatgtacaaggtctccctagtttttttttctctccatgtatgatacgcacgtagtatttcatagctaaatgtagtaatatcttattttattgttcttc

SEQ ID NO: 190 - protein, 781 aa, Oryza sativa
MVMLFPSPATAALLVLVVLLLQLQLWSAEAQVAVGSGPPAGCPDRCGNVSVPFPFGIRTGCSLEGFGLTCNTTSNPPRLMIGNSTLQVVSISLANSTLRAVDIAGAVNITYDVVSGTTGNGTWGGVAATSTNPYVVSGELNQLLVTACNIQVTLVGSGGNVITGCSSFCSINDKYTGGVFRSPGNKCAGISCCQTPISIGRPSYSVKVTIMDNEYRGEVPEAIRIAELGWFDGLAANLLKKPAANDTSLRTPVPVVLEWAVASTGLDVTLDAGLNNQAANNWSCPTPGEARRSACISNNSYCHNVTDNYRSGYVCRCDDGYDGNPYVAGGCQDINECERPKEHGCFGECTNTPGAFLCRCPHGARGNYSIPNGCTKSNLGLTIGVGIGSGAGLFILALGAVFLTRKIKQRRARTLRQKFFKQNRGHLLQQLVSQKADIAERMIIPLAELEKATNNFDNSRELGGGGHGTVYKGILSDLHVVAIKKSNVTVQREIDEFINEVAILSQINHRNVVKLFGCCLETEVPLLVYEFISNGTLYHHLHVEGPTSLPWEDRLRIATETARSLAYLHSAVSFPIIHRDIKSHNILLDGSLTTKVSDFGASRCIPAEQNGVTTAIQGTLGYLDPMYYYTGRLTEKSDIYSFGVVLMELLTRKKPHSYRSAEDESLVAHFTTLHAHGNLGDIFDAQVMEEGKKEVNEVAVLAVACVKLKAEERPTMRQVEMTLESIRSSSLQQEVLHSVSTKKSKELHVSWSHAISEGTSLDSTRQYSLEEENLLSSRYPR

SEQ ID NO: 191 - DNA, 2634 bp, Oryza sativa
aggaatataaacacagactatgttccagcgatgatgaccatcattcaaccaccggctatggcgatggcgatggcgatggcgctgctgctgctgctgcttctgcagctgtggtcggtggaagcgcaggtcgcagcgccgccgccggcgagctgcccggacaggtgcggcgacgtgagcgtgccgtacccgttcggcatccgcgacggctgccacctcccgggcttccgcctcacctgcgacgccacccacaccccgccgcgcctgatgctcggcaacggcaccctccaggtcgtcgacatctccctggccaactccaccgtgcgcgccctcgacctcgccggcgccgtcaacttcacctacgacgtgtcgaagctcgcccccagcggcagcggcacgtggtccagcctcggcaccgtcgccggcgccggcccgtacgtcgtctccgagcagcgcaaccggctcgtcgtcacgggctgcaacgtccaggccacgctcgccggggagaacaccaacatcatcggcggctgctcctccttctgcccggtcagcgagatgttcaccagcgtggcggcgaccgtccccgtcgtccccggcgccggcgccgacaacgccaccgatggcggcttcatctgctccggcaccagctgctgcgagacgcccatcgccatcggccgcccctcctacctcgtgcagttcctcagccttgaccagaaccaggagctcaccggcaagctccccgtcgccgtgcgcatcgccgagcgtgggtggttcgagggcgtcgccggcgagctgctcaacaccagctccgactccgccgccgccctccggacgccggtcccggtggtgctggagtgggtggtgtcgccgacgctggaggcggtgctgcagggcgtcaccgggcagttcgccgacgaccgcaactggtcgtgccccgcggacgcggcgaggagcgcatgccggagcagcaacagcttctgcagcaacgtcaccggcaactaccgccgcggctacgtgtgcaggtgccggcgaggctacggcgggaacccctacgtcgccggcggatgccaagacatcgacgagtgcaagctcgccgggaggtgctacggcgagtgcaccaacacgccgggagattaccagtgccggtgcccgcgcggcgctcgtggcgacccgcgcattccaaacggctgcgtcaaaactaatctaggtttaagtgttggtattggagttggcagtggagctgggcttttggtaatgggactgggcgctgcctttttaaaacgtaaggttaagaaacagagagcaagaatgctgaggcagaagttcttcaagcagaaccgaggtcatttgttgcaacaactagtgtctcagaaggctgacattgctgaaaggatgatcatccccttgtcagaactggagaaggccacaaacaattttgataaatcacgtgagcttggaggaggggggcacggcaccgtgtacaaagggattttatcggatcttcatgttgtcgcgatcaagaaatctaaggaggcagttcaaagagagattgacgagttcataaatgaggtagccattctctcgcaaatcaaccatcgtaatgtggtcaaactttttggatgttgtcttgagacagaagtgccattgctggtttatgaattcatatcaaatggtaccctttaccaccatcttcatgttgaaggaccaatgtcattgccatgggaagataggctcagaattgcaaccgaaaccgctagagcacttgcctaccttcactcagctgtgtcgttccctataatccacagggatatcaaatcccataacatcctattagatggttcactaacaacaaaagtgtccaattttggagcttcaaggtgcattccagctgaacaaactgggataacaaccgttgttcaaggaacactaggatatctggaccccatgtactactacacagggcgtctcactgagaaaagcgatgttttcagcttcggcgtcgttctaatagagttgcttactaggaagaaaccatactcatacagatcgcctgatgatgaaagtcttgtaacacatttcactgccctactcacacaaggcaacttgggcgacatacttgatcctcaggtcaaggaagagggaggcgaagaagttaaagagatagctgtgttagctgtggcatgtgccaagctgaaagtagaggagcggcctactatgaggtaggtggagatgacactcgaaagtgttcgattgtcatcacagcagcaagagcatggtgtgggtgcaaagaaatccagggagaatcatgtctcctggagctacccggtaagtgagggtacaagtacacaatcaactagacaatatagccttgaagaagagtatttgttgtcatcaaggtttcccagataatggatttttttttctggagtggttttggatcaatagaaagagttgtcacaatgtacaaggcatatgatatgcatgattttcatagctaaatgtgcactgttttattgttcttcttatgaatatgtatcttcctactggtttcttccaagtacatgtcaaattaccctctgtattcaactgatactgtgaagtaagagcatataaaattcaggtagctttctcatttgt

SEQ ID NO: 192 - protein, 729 aa, Oryza sativa
MMTIIQPPAMAMAMAMALLLLLLLQLWSVEAQVAAPPPASCPDRCGDVSVPYPFGIRDGCHLPGFRLTCDATHTPPRLMLGNGTLQVVDISLANSTVRALDLAGAVNFTYDVSKLAPSGSGTWSSLGTVAGAGPYVVSEQRNRLVVTGCNVQATLAGENTNIIGGCSSFCPVSEMFTSVAATVPVVPGAGADNATDGGFICSGTSCCETPIAIGRPSYLVQFLSLDQNQELTGKLPVAVRIAERGWFEGVAGELLNTSSDSAAALRTPVPVVLEWVVSPTLEAVLQGVTGQFADDRNWSCPADAARSACRSSNSFCSNVTGNYRRGYVCRCRRGYGGNPYVAGGCQDIDECKLAGRCYGECTNTPGDYQCRCPRGARGDPRIPNGCVKTNLGLSVGIGVGSGAGLLVMGLGAAFLKRKVKKQRARMLRQKFFKQNRGHLLQQLVSQKADIAERMIIPLSELEKATNNFDKSRELGGGGHGTVYKGILSDLHVVAIKKSKEAVQREIDEFINEVAILSQINHRNVVKLFGCCLETEVPLLVYEFISNGTLYHHLHVEGPMSLPWEDRLRIATETARALAYLHSAVSFPIIHRDIKSHNILLDGSLTTKVSNFGASRCIPAEQTGITTVVQGTLGYLDPMYYYTGRLTEKSDVFSFGVVLIELLTRKKPYSYRSPDDESLVTHFTALLTQGNLGDILDPQVKEEGGEEVKEIAVLAVACAKLKVEERPTMR

SEQ ID NO: 193 - DNA, 2572 bp, Oryza sativa
agtcggccatgctgccttgatgatcgatcgatgcaaaggcaggcaggaggattcatttccatggcgtggtcaatgccaccgctggctttgttcgccgccgtgctggcgctgcagcaagctatcgccgccgccgcggcggccggagactgcccgaccacctgcggcgacgtggccgtgccgttcccgttcggcatcggcgccggctgctaccacttgcccgggttcaacctcacctgcgaccggagcagcgacccgccgcggctgctcctcggcgacgccgccgcgttccaggtgctcaacgtctccatcgtcaacgccacggtgcgcgccgcccgcgtcggcggcataaacatcacctacggcggcgggaacacgtcgtcggccgacgagggacgcggcgcttggcgggggctcggcgacggcgggccgttcgcgctgtccgaggatcgcaacgagctcgtcgtcgtctgggggtgcgacgtcgtggcgctgctcaccgacggcggggggagcggcaacagcagcaacgtcaccatcagcggctgcgcctccttctgccccggcaccgacgccggcggccaagcgatcgccgccccagcgggttccacgatgtcgctgaccgaggacaggcggtgcaccggcgtcggctgctgccagatgcccatcagcgtcggccgcgactcctaccaagtgcgtctccgccggctcaacccgagcccgccccagccgccgccgccgcagggcgccggcgacccgacggtggtgctcatcgcggagcaagggtgggtcgccgaggcctctaggtccacccgaggctacccgctcccggtcaccttcgacgagacggcggtgcccgtgttgctggggtggatgatcgcgtcgacccgcgtcggcgccgacggcgaggtgccggtgaactcgacgtgccccgccgacgccgcgcgcagcgcctgcaagagcagccacagctcgtgccgcaacgtctccagctccgcgcgcgccggctacgtctgcgactgcgacgccggcttccatggcaacccctacctcgccaccggatgccaagacatcaacgagtgcgagcgtgcagaggagcacggttgcttcggcgagtgcatcaacacggccggatcgttcctgtgccggtgccctgcaggaatgcaaggcaactacacccaacgcaatggatgtttcagacctcctcttcctgctcgttcttctacaggtttaagcatcggtgtgggtgtcagtagtgctgcaagccttatacttatagtgatcatggcgatcttcatcatccgcaagcagaaacgcaggagggccaagaagattaggcagaagtacttcaagcagaatcgtgggcagctactgcagcaactggtagctcagagggctgacattgcagagaggatgatcataccgttgggtgagctcaagaaggcaacaaacaactttgatagagctcgtgagctcggcggcggcggccatggcaccgtgtacaaggggatcttgtccgatctccatgtcgtcgccatcaagaaatcaaagattgcagttcaaagggagatcgatgagttcataaacgaggttgccattctctcgcagataaaccataggaacgtggtgaagcttttcggatgttgcctcgagacagaagtgccattgcttgtctatgagttcgtttccaatggaaccctttacagccatctccatgtcagtggaccaagatcactaccatggagtgacagattgaggattgcaactgagacagccaaagctattgcctatctgcactcatcagtttcaatcccaataatccacagagatatcaagtccactaatatactcctcgatgacactctgacctccaaggtgtcagactttggagcttcaagatgtatcccggttgatcaaacaggggtaacaacaaaggttcagggaaccttaggatacatggatccggcatactattacactcagaggcttacagaaaagagcgacgtgtacagcttcggggtcattcttgtagagcttctcacaaggaagaagccattttctcacctgacacctgagggtgaaggtctggttgcacattttgtcacttcatttacagaaggcaatctagttggagtgttagacctgcaaatcatggaggaggcagacatgaaagttgtcgaagtagtagctacgctagctgtgacatgtgtaaatctgagaggagaggaccggcctaccatgagacaggttgagatggcacttgaaggcattcaggcatccagggaaaatgtttcaggtaatctttctgcagagaagcttggagagagcaataatgtcgcgagggatttcatgccaagccaagaaggaagaagcatgacagaagggactaggcaatatagtttggaagaagagttcttgttgtcttcaaggtaccctcggtagttttctggtcatctgtgttcatgtaaagctgatttcagtttcatttttccccaaggagtttatgtgttctttaaagaattgaaaattaccctcattcgagttaaaaacaatgggccatgacatgcttcttacc

SEQ ID NO: 194 - protein, 802 aa, Oryza sativa
MQRQAGGFISMAWSMPPLALFAAVLALQQAIAAAAAAGDCPTTCGDVAVPFPFGIGAGCYHLPGFNLTCDRSSDPPRLLLGDAAAFQVLNVSIVNATVRAARVGGINITYGGGNTSSADEGRGAWRGLGDGGPFALSEDRNELVVVWGCDVVALLTDGGGSGNSSNVTISGCASFCPGTDAGGQAIAAPAGSTMSLTEDRRCTGVGCCQMPISVGRDSYQVRLRRLNPSPPQPPPPQGAGDPTVVLIAEQGWVAEASRSTRGYPLPVTFDETAVPVLLGWMIASTRVGADGEVPVNSTCPADAARSACKSSHSSCRNVSSSARAGYVCDCDAGFHGNPYLATGCQDINECERAEEHGCFGECINTAGSFLCRCPAGMQGNYTQRNGCFRPPLPARSSTGLSIGVGVSSAASLILIVIMAIFIIRKQKRRRAKKIRQKYFKQNRGQLLQQLVAQRADIAERMIIPLGELKKATNNFDRARELGGGGHGTVYKGILSDLHVVAIKKSKIAVQREIDEFINEVAILSQINHRNVVKLFGCCLETEVPLLVYEFVSNGTLYSHLHVSGPRSLPWSDRLRIATETAKAIAYLHSSVSIPIIHRDIKSTNILLDDTLTSKVSDFGASRCIPVDQTGVTTKVQGTLGYMDPAYYYTQRLTEKSDVYSFGVILVELLTRKKPFSHLTPEGEGLVAHFVTSFTEGNLVGVLDLQIMEEADMKVVEVVATLAVTCVNLRGEDRPTMRQVEMALEGIQASRENVSGNLSAEKLGESNNVARDFMPSQEGRSMTEGTRQYSLEEEFLLSSRYPR

SEQ ID NO: 195 - DNA, 948 bp, Oryza sativa
atgattttttccaaagatgagctaaaaaagatcacaaagaacaattcagaggttcttggtcaaggaggctttggtaaggtatacaaggggactcttggagataatactattgtcgctgtgaagacctcaattgaggtaaatgaagcacgaaaggatgatttcacaaatgaggtggatgttccgatgttggtatatgaatttgcggctaatggcaatctgcaagatattctccatggtgatggaaatatccctctaccattacacttacgcctagacattgcaattgaatctgccgaaggtctaagatacatgcactcctcaactaatcgtaccatacgacatggcgatgtcaaaccagccaacatacttctaacggataagttcatccctaagatatcagactttggaacttccaagcttcttactgtagacaaagactttaccatgtttgtggtaggaagcatgggctacatagacccagtgttccataagactggtcatttaacacagaagagtgatgtgtatagctttggagttgtactacttgaactcataagtagaaagccaacaatatatggtgaaaattgtagcctgatcattgagttccagaagtcctacgataaagagaatagtgggagaatgatgttcgacaaggatattgaaattgaagaagacatcctcatccttgaagaaattggcaggctggcaatggagtgtttgaaagaaaaggttgaagaacgacctgatatgaaggaggaagaacgaaagatgaagaaacaaacgactaacaatgtcatcgtcttccctagccgaaagaagaaacaaaagagaaaggaagatgggcgccgattctctggtgaccaaacagcggcgagagttcggttaaagtttgcacttaacgaccgtcaacaacaccgcaacacttatcctttacttgtccctgagtaa

SEQ ID NO: 196 - protein, 315 aa, Oryza sativa
MIFSKDELKKITKNNSEVLGQGGFGKVYKGTLGDNTIVAVKTSIEVNEARKDDFTNEVDVPMLVYEFAANGNLQDILHGDGNIPLPLHLRLDIAIESAEGLRYMHSSTNRTIRHGDVKPANILLTDKFIPKISDFGTSKLLTVDKDFTMFVVGSMGYIDPVFHKTGHLTQKSDVYSFGVVLLELISRKPTIYGENCSLIIEFQKSYDKENSGRMMFDKDIEIEEDILILEEIGRLAMECLKEKVEERPDMKEEERKMKKQTTNNVIVFPSRKKKQKRKEDGRRFSGDQTAARVRLKFALNDRQQHRNTYPLLVPE

SEQ ID NO: 197 - DNA, 870 bp, Oryza sativa
atggcgttgagggcagtagcagtagcaggggccctgctgctgcttgtggttgtgggttcttccgccgccggtgccggtagtggcagctgccagacaaggtgcggcgacgtggacatcccgtacccattcggcatcggccccaactgctcccgcggcgttgggtttgagatcgagtgcaatacgaggaacggcagcggcgacttggtgccgaccctggcggccaccagcttgagcatcgtgcagaacctgtcggtggagtcgcctccaatggcgaaggtgatgctgccggtggcatacaagtgctacgacgacccaacaaaaacccaagatttcaacggcgaggtagagctgaacaagaccggcgtgtaccgcatctccgatgagctgaacatgctggtcgtcctcggctgcaacaccatggtgtacaccaagaacggcaacagtgagggcggcctatacccgtacctctactacaccggctgcatcgcctactgcaacgactccaggagcgcacaagacggcaagtgcgccggtgccggctgctgccatgtcgacatccccggtggcctcaccgacaacaccctcgtcttcgactcgtggaaccgtaccaagtgcctcccaggctaccatgggaacccttatgagtattacgatgacaagcagggcaaaggatgtctggacatcaacgagtgcctagcgcccgagctgtatcactgtaacggagtatgcaacaacatcccaggcaattacacgtgtcattgccacgcaggttaccagtctaatgatgcaaagacacaacggtgcactcctaagttccccgttgcatcaagaattgcacttgttttgtcatacaccgagttaaatctgtag

SEQ ID NO: 198 - protein, 289 aa, Oryza sativa
MALRAVAVAGALLLLVVVGSSAAGAGSGSCQTRCGDVDIPYPFGIGPNCSRGVGFEIECNTRNGSGDLVPTLAATSLSIVQNLSVESPPMAKVMLPVAYKCYDDPTKTQDFNGEVELNKTGVYRISDELNMLVVLGCNTMVYTKNGNSEGGLYPYLYYTGCIAYCNDSRSAQDGKCAGAGCCHVDIPGGLTDNTLVFDSWNRTKCLPGYHGNPYEYYDDKQGKGCLDINECLAPELYHCNGVCNNIPGNYTCHCHAGYQSNDAKTQRCTPKFPVASRIALVLSYTELNL

SEQ ID NO: 199 - DNA, 2382 bp, Oryza sativa
atggcatcgttgcggctattggccggagtgctgctcattctgatgtcctccgccgccgtgggcatcgccggccggcctgccggctgccaggcgaggtgcggcgacgtcgacattccatacccgttcggcatcggcggcggctgcttccgcagcgcgggcttcgagatcgcttgcaacacaagcaacggcggcttggtgcccaccctcgccgccgccaacgacaccatccaggtgcagaatctgacggtgttcccacggccggaggtgaaggtgatgctgccggtggcgtacaggtgctacaactccagcggcaacgtcaccgagcagttctacggcgacgtggagctgaacaagaccggcgtgtaccgcatctccgacgagcgcaacaagttcgtcgtcctgggatgcaacaccgtggcatggaacaagcacggggacagcgagggaaaaggcctctacacaagcctctactacgccggctgcgtcacctactgcagcgactcgctgagcgccaagaacggcaagtgcgccggcgtcggctgctgccacgtcgacatcccgccggagctcaccgacaacgtcgtcaccttccagcaatggccgcgcggcgaacaggtggacttcagcccctgcgactacgccttcctcgtcgacaaggaagagtaccaattccagaggtctgatctcaacatggaccggaaacagaggatgccggtgtggctggactgggccatccgcgacgtggcgtcctgcccggcgccggaggtggagacgtcgaagaagaatatgccagctggatacgcctgcgtgagcgtcaacagcacgtgcgtcaactccaccaacggcctcggatactactgcaactgcagcagtggctacgagggtaacccttacgacgacgatcccaataaaggatgcaaagacatcgatgagtgcgcacaccccaacaagtatccttgccacggtgtctgtaggaacactccaggagattacgagtgccgctgccacacgggttaccagccaagtggtgatggtccaaagaaacaggagtgcagttcaaaatttccttttccagcacggcttgctgttggtatcactttaggattatccttcctgattgttgttgttcttttcacactaatgatgcttcaaaagagaaaaatgaacaaatatttcaagaagaatggtggttcagtattacagaaagtggacaatatcatgattttctccaaagatgaggttaagaaaatcctaaagaacaattctgatattattggtgaaggaggatttggtaaggtttacaaagggagactaaaagatgataccctggtggctgtgaagacttccattgaggtaaatgaagctcgaaaagaggatttcacaaacgaagttatcatacaatcgcaaatgatgcacaataacattatcaagcttttgggttgctgcttggaagtggatgttccaatgttagtgtacgagtttgccgctaatggcagtctcaaagacattctccatggtgatgcgaatcgtctagttcctctatcactagacctacgcctagatattgcagttcaatctgcagaaggtctaaggtacatgcactcgtccataagtcataccatacgacacggtgatattaagccagctaacatacttctaactgataagttcattgcgaagatctcagactttggaacatccaagcttcttactgcagacaaagaatttaccatggttgtggcagggagcatgggctacatagacccaatcttctatatgactggtcatttaacacagaagagtgatgtatatagttttggagttgtgttgttggagctcattagcagaaagccaacaatatatgacaagaactatagccttgtcattgagttccaaaaggcgtatgatcgagaaaatagtgggagagcattgtttgataaggagattgcaattgaagaagatgtcttgatcttagaagaaattggtaggttggcaatggattgtttaaaagaaaagattgaggaacgacctgatatgaaggaggtagctgcacggcttatgatgctgcgaagatctagaaaccttggacaagaaaactacaatagattttctaaatcgagattgttggaggtataccacgaagggccttcggccggacttgccgaaaccaagaacttgggcaacaggctcagaccggaggcaagcggtgaaggtcgagaagaaaaccatatgggcgaaagccacagggtgaaagccgtggcaaggcattacacgggcctcaccagtcaaggacctcatcggagggcctcacgggcggagacggtgaggcaaaagcctcggcgcgaaggcacgggcttcgccaagtaccaaaccccaccgtga

SEQ ID NO: 200 - protein, 793 aa, Oryza sativa
MASLRLLAGVLLILMSSAAVGIAGRPAGCQARCGDVDIPYPFGIGGGCFRSAGFEIACNTSNGGLVPTLAAANDTIQVQNLTVFPRPEVKVMLPVAYRCYNSSGNVTEQFYGDVELNKTGVYRISDERNKFVVLGCNTVAWNKHGDSEGKGLYTSLYYAGCVTYCSDSLSAKNGKCAGVGCCHVDIPPELTDNVVTFQQWPRGEQVDFSPCDYAFLVDKEEYQFQRSDLNMDRKQRMPVWLDWAIRDVASCPAPEVETSKKNMPAGYACVSVNSTCVNSTNGLGYYCNCSSGYEGNPYDDDPNKGCKDIDECAHPNKYPCHGVCRNTPGDYECRCHTGYQPSGDGPKKQECSSKFPFPARLAVGITLGLSFLIVVVLFTLMMLQKRKMNKYFKKNGGSVLQKVDNIMIFSKDEVKKILKNNSDIIGEGGFGKVYKGRLKDDTLVAVKTSIEVNEARKEDFTNEVIIQSQMMHNNIIKLLGCCLEVDVPMLVYEFAANGSLKDILHGDANRLVPLSLDLRLDIAVQSAEGLRYMHSSISHTIRHGDIKPANILLTDKFIAKISDFGTSKLLTADKEFTMVVAGSMGYIDPIFYMTGHLTQKSDVYSFGVVLLELISRKPTIYDKNYSLVIEFQKAYDRENSGRALFDKEIAIEEDVLILEEIGRLAMDCLKEKIEERPDMKEVAARLMMLRRSRNLGQENYNRFSKSRLLEVYHEGPSAGLAETKNLGNRLRPEASGEGREENHMGESHRVKAVARHYTGLTSQGPHRRASRAETVRQKPRREGTGFAKYQTPP

SEQ ID NO: 201 - DNA, 954 bp, Oryza sativa
atggcgttctggctaattgccgccggcggcctgctgcttcttctccgtttcgctttcgccgccgacggaatcaccggctgcccggataggtgcggcgacgtcgatatcccttatccattcggcatcggccccaactgctcccgcggggacggcttcgacatcgcctgcaacaccaccaacagcaccggtgtcctagtgcccaccctcgccgccgcccgccgccatgccatccaggtccagaagctgacggtgttcccgcggccggaggtgaaggtgatgctgccggtggcgtacacgtgctacaactccggcggcaacgtcaccaggcagttcgacggcgacgtggagctcaacaacgagggcgtgtaccgcatctccgacgagcgcaacatgttcgtcgtcatcggctgcaacaccgtggcgtggaaccagcacggggacagcggtggcaaaggcctctaccgcaacctctactacgccggctgtgtcacctactgcagcgactcgcggagcgccatggacggcaagtgcgccggcgtcggctgctgccacgtcgacatcccgccggagctcaccgacaacgtcgtctacttcgagcaatggccgcgcggcgaacaggtggacttcagcccctgcgactatgccttcctcgtcgacaaggaggagtaccgattccggaggtcggatctcaaaatggagttgaaccggaggatgccggtgtggctagactgggccatccgtgaccgccgcggcaacgactcctccgtggcgtcctgcccggcgccggaggtggagaagaagaagccggccgggtatgcctgtgtgagcgccaacagcgagtgcgtcaactccaccaatggcccgggatactactgcaattgcagcaatggttacgagggtaatccctacgacaacgatggatgccagggtaagaatgtttgctcatgcatttaa

SEQ ID NO: 202 - protein, 317 aa, Oryza sativa
MAFWLIAAGGLLLLLRFAFAADGITGCPDRCGDVDIPYPFGIGPNCSRGDGFDIACNTTNSTGVLVPTLAAARRHAIQVQKLTVFPRPEVKVMLPVAYTCYNSGGNVTRQFDGDVELNNEGVYRISDERNMFVVIGCNTVAWNQHGDSGGKGLYRNLYYAGCVTYCSDSRSAMDGKCAGVGCCHVDIPPELTDNVVYFEQWPRGEQVDFSPCDYAFLVDKEEYRFRRSDLKMELNRRMPVWLDWAIRDRRGNDSSVASCPAPEVEKKKPAGYACVSANSECVNSTNGPGYYCNCSNGYEGNPYDNDGCQGKNVCSCI

SEQ ID NO: 203 - DNA, 1542 bp, Oryza sativa
atggcaatgctagtgcggagggacatggtgagcttggtcaaggggattgccagttctcaaggtggaatggagaagagccagcgaagtgatgagaaaagaaatctcttaggtggcgccaacctcgatgtctacaaagcacatatctggcctttggcattagattggagtgacatggcaatgagtttatatgcacccatgtatgcagatatcaacgagtgcgatccatccaacaaggacaagtacccctgctatggggtttgcaagaacattgtaggagattacgaatgcagctgtcatactggttaccagccaagtggtggtggtccaaagaaacaggagtgcaatccaaagtttccagttgcagcacagcttgcccttggtgtcagtttgggattttccttcctggttgttgttgttcttttcacactaatgatgcttcaaaggagaaaaatgaacgaatatttcaaaaagaatggtggttcaatactacagaatgtggacaatattgtgattttctccaaagatgagatgaagaaaatcctaaaaaacaattcagaagttattggtcaaggaggctttggtaaggtctacaaaggtagacttaaagacaataccctggtagcagtgacgacttcaattgaggtaactgaagctcaaaaggaggatttcacaaacgaagttatcatacaatcgcgaatgatgcacaataacattatcaagctattgggctgttgtttggagatggatgttccaatgttggtatatgagtttgccgctaatggtagcctaaaagacattctccatagtgatgccagtcacctagtccctctcacactagatctacgcctagacattgcaattgaatctgcagaaggtctaagatacatgcactcgtccataagtcataccatacggcatggtgatgttaagcccgccaacatacttctaactgacaagtttgttgcaaagatctccgactttgggacatccaagcttcttactgtagacaaagaattcaccatggttgtggcaggaagcatggggtacatagacccagtgttctatatgactggtcacttaacacaaaaaagtgatgtgtttagttttggagttgtattgctggagctcatcagcagaaggcaaacaatatatggcaagaaccgcagcctcattattgagttccaagaggcatatgatcaagcaaatagtgggaggttattgttcgacaaggatattgccatcgaggaagatgtcttaatcctagaagaaattggtaggttagcgatggaatgtttaaacgaaaagattgacgagcgtcctgatatgaaggaggtagtggcacgacttatgatgctgcgaagatctaggaagcttaaacaagaaaactacaacataagtcgtcaacagttctttgaggagaatagtatagatgaactccctaagagctttgatgacaacagctcaagtagcagtgcagagcttttatccaatctagccacaaagaactctctaacctatagatcgacgactggaagagattag

SEQ ID NO: 204 - protein, 513 aa, Oryza sativa
MAMLVRRDMVSLVKGIASSQGGMEKSQRSDEKRNLLGGANLDVYKAHIWPLALDWSDMAMSLYAPMYADINECDPSNKDKYPCYGVCKNIVGDYECSCHTGYQPSGGGPKKQECNPKFPVAAQLALGVSLGFSFLVVVVLFTLMMLQRRKMNEYFKKNGGSILQNVDNIVIFSKDEMKKILKNNSEVIGQGGFGKVYKGRLKDNTLVAVTTSIEVTEAQKEDFTNEVIIQSRMMHNNIIKLLGCCLEMDVPMLVYEFAANGSLKDILHSDASHLVPLTLDLRLDIAIESAEGLRYMHSSISHTIRHGDVKPANILLTDKFVAKISDFGTSKLLTVDKEFTMVVAGSMGYIDPVFYMTGHLTQKSDVFSFGVVLLELISRRQTIYGKNRSLIIEFQEAYDQANSGRLLFDKDIAIEEDVLILEEIGRLAMECLNEKIDERPDMKEVVARLMMLRRSRKLKQENYNISRQQFFEENSIDELPKSFDDNSSSSSAELLSNLATKNSLTYRSTTGRD

SEQ ID NO: 205 - DNA, 2263 bp, Oryza sativa
tggcagagacagggtggtcaacattgagggatctgtaatgttggtatacgacacagcttgcagaaaataagattatgattggaaatatcacacgatgctatgataagttgaagttcaaagtagacatcaatcagaatattaaggttttcacagaagatgagattaaacggattactagcaacttcagcattccgatcggacaaggcggctttggagaagtgtataaagggactcttgatgatgactatgatcttgttgcggtgaagagatatattagcaaagatttaaggaaagagtttatggaagaagtaagcatccatagtcaaatgagtcacagaaatgtggtggagctcataggctattgcattggagaaagtactctaatgattgttactaagtatatctccaaaggaaaccttgatgacatactccacaacagtgacatttccatccctttggatgtaaggctgggtattgctataggatgtgcggacgcattgagctacatgcattcgatgcatttatcgaatggcagtcttatttgtcatggtgatattaagcctgccaacatacttctagatagcaatctgacatcgaaattgtcagactttggagtgtcaaggcttctttcaggtggtgtcactcagtacactgtacatataaaaggaagcgtatcttacatggatcctatatactttcatgagggttgtcttactccgaggagtgatgtttatagtttcggaatggttctcttggaactaatagctcgaaaaagggtaagaaaaggtgacattaacctcattggaggtggagaaatatttgatgctgagatagcaaaccggagcaatatgaagattctaaaagaaatgaggaaattggcaattgaatgcctaacactggacattcataaacgtcctcaaatgaatgttgtggcaaaacgccttcgtacacttaaaaaagaattaaaagacatgcatggaagatactcagaacacattttggcatcacaccgctcatggcgaaaaaatgacaaccaggggccgagctataattctaggatgcaactgaagaagagtttgagcattttcaagagaaatcttagcaattcttctaagatcctattgggactcggcaatatgagaattttcacacaggaggagctaaatgaaatcacacagaattactcgtgtctactcagtggaggtacttcgggtaaggtttacaaaggaacgcttgaggacaatacggtggtagcggtgaggatattttccgaggcacttgagggtttcgaagaggcgtttatcaacggagggatgatcctatctcaaattgtccacaagaacatcatcagactcttgggttactgcttgaatgctgattgtcccgcatttgtgtacgagtatgctgctagaggaaccctctctgacattctagatggccgtgaagatttcccactgcatttacgcgtgaagatcgcagttgagacagcagaagcattagagtacctccattcctcagcagctggtatgatcagacatggctatgttgcaccatccaagacacttgttgatgacagtttcacgccaaagctgacgggattctcatgggcgcagaggctcaacaatgatgacagcgcaattcatgatcatgataagtactgtgtgtcactaaaactgaaaaccgatgtgtatcagtttggtgttcttgtcttgacgctcattagtaggaagaactttgcgttttatgcggatcacgaacaccttgtctcgcaattccttgcagcttacaaggcagataacagtggaagggcatttttcgacgatgatatcacaactcgtagcgaagatgttgctctcctcgaagagatagggaagctattgctcaagtgtatttgtttggaaatagatcaaagaccaacaatgaaacaagtggcacaacaccttcggatcattcggagatgttggaagaataattgcacagccgatggagcttcactggtaactaattaaatctcatatatatcactagagctgatcaaggaactgaacttgacagtacacttggttcactctaagtgatcgtgtacaagcattgtgtgtgaattgtaatatattatttgttaccagaacatcttgcagtatatgctgccattcggatgatgttatctgaacttgcatgcaatctgcttcttatgcggtcgatcccatgatgtttatctgaacttggttctactagtggatatagaaaattcatgttcaatgtt

SEQ ID NO: 206 - protein, 644 aa, Oryza sativa
MIGNITRCYDKLKFKVDINQNIKVFTEDEIKRITSNFSIPIGQGGFGEVYKGTLDDDYDLVAVKRYISKDLRKEFMEEVSIHSQMSHRNVVELIGYCIGESTLMIVTKYISKGNLDDILHNSDISIPLDVRLGIAIGCADALSYMHSMHLSNGSLICHGDIKPANILLDSNLTSKLSDFGVSRLLSGGVTQYTVHIKGSVSYMDPIYFHEGCLTPRSDVYSFGMVLLELIARKRVRKGDINLIGGGEIFDAEIANRSNMKILKEMRKLAIECLTLDIHKRPQMNVVAKRLRTLKKELKDMHGRYSEHILASHRSWRKNDNQGPSYNSRMQLKKSLSIFKRNLSNSSKILLGLGNMRIFTQEELNEITQNYSCLLSGGTSGKVYKGTLEDNTVVAVRIFSEALEGFEEAFINGGMILSQIVHKNIIRLLGYCLNADCPAFVYEYAARGTLSDILDGREDFPLHLRVKIAVETAEALEYLHSSAAGMIRHGYVAPSKTLVDDSFTPKLTGFSWAQRLNNDDSAIHDHDKYCVSLKLKTDVYQFGVLVLTLISRKNFAFYADHEHLVSQFLAAYKADNSGRAFFDDDITTRSEDVALLEEIGKLLLKCICLEIDQRPTMKQVAQHLRIIRRCWKNNCTADGASLVTN

SEQ ID NO: 207 - DNA, 1778 bp, Oryza sativa
ataccgaactctctcgatccctttccgtaaaaaacaaaagaaaaaaaactctcccgatcccctccgccgccggcaaacccacgccctcgtggcgccgctctaggtccccagcccgccgccgagtgccagccatcccactccacctttgcctcgtcgtctcaatcgccttcgtcggccgtcgctcggctctcttcgctcggtcatggagcaactggatccaccgcttccaagactccaagttttgaatcaaggagtacagcttcaggaccacaagcctggcgtcctcgccgccgtcggcctccacacgacgggtgaagtcgaggatctgcaaatcgacaagctttgttgacttggtcgacaaccacttctgctgtatatgtgtagacaagacattgacgagtgccaactccgaatacaatttcctgagcttcgcgacgtgtacccgtgctcgagtgatgggatctgcaagaacaggccgggaggttatgactgtccgtgcaaacctggcatgaaaggcgatggcaaagcaggaacttgcactgagaaatttccactggtagccaaagtgattgtgggagtcgtagcgggtctccttgtcctcgcaactctggtttttgttttccttcttcgcaaggagaaacaaaagatgagggaatttttcattagaaatggtggtcctatactggaaaatgcaaagagcataaagatattcaggaaggaggagctaaagcgaattacaaaaacttatagtcatgttcttggaaatggtgcctttggtatggtatataaagggttccttgatgaacagcatcctgttgcggtaaagaagtccatgaaagttgacaagacgcagaaggaccaattcgcaaatgaagttattatccaatctcaagtaatccataagaacatcgtcaggctaataggttgctgccttgaggtagatgtcccgatcttggtctatgaatttgtttcgaatggtagcctgcaagacatccttcacggtgagaacaaagttcctctcactttagacaaacgtttggccattgctgccgaatctgcagaaggcctggcttacatgcattccaagacctcaactagcattcaacacggtgacgttaagcctgccaatatacttttggacgatcaattcaacccaaaaatatctgattttggaatatcaaggttaattgcaagagatgtcaccgagcacactaacgatgttattggcgacaacaactatatggatccagtttatcgtgaaactggtctgctaactaacaagagtgatgtctacagtttcggtcttgtgctctttgaaatcatcaccggtaagaaagctgtttatggtggtgaaagtagctttgtcagaaattaccttgacacatacttaactgagataagagcaaataagatgctgtttggtaaggaggctgaagaaaaggacattgagcatctccataatcttgttgtgatatccaaagagtgtttagacaataatgtggaccaaaggcccgagatgacagatatagcagaacgtctgcaaggcattattagatcccggaagtttcttaattgattcgcgcgcgaatggaggatgtgcttgtatccagataaagtatatcggtctgttagtttatctttatctacactagttctacaataaaatgttgcttgcttctaaatacctaatgtctatttgtcattctatttctaaatgaaatatgcgtgtaatttgctagcatcaattcccaaatgaagttgtatttggccataacctc

SEQ ID NO: 208 - protein, 722 aa, Oryza sativa
MAAMILIAVAVVVQQALILAARAIGDGQPITLAGCPDRCGDVSIPYPFGMAPGCFLDGFEVTCNRTFDPPRAFLAWGSPDSPFQGNADGYYLSDNDSVTLKDYWSLPVELVDVTLSRGEARAYGAVTTDCAATNGTYHEFRRQLTVLSGSPFVFSASRNVLTGVGWDMEAQLTTSLASTGYRLNCASRLMFPETAENGSCSGMGCCEANVTAGLRIASVTFAHKKNVFWSSNPCSYGMIVQKNWYNFTKEDLYGNQTLSRKHPRGVPFVLDFAIANVSCPAQGQPPLDNYACRSSNSFCVNATSSPGYICKCSDHYDGNPYIADGCQDIDECQLRIQFPELRDVYPCSSDGICKNRPGGYDCPCKPGMKGDGKAGTCTEKFPLVAKVIVGVVAGLLVLATLVFVFLLRKEKQKMREFFIRNGGPILENAKSIKIFRKEELKRITKTYSHVLGNGAFGMVYKGFLDEQHPVAVKKSMKVDKTQKDQFANEVIIQSQVIHKNIVRLIGCCLEVDVPILVYEFVSNGSLQDILHGENKVPLTLDKRLAIAAESAEGLAYMHSKTSTSIQHGDVKPANILLDDQFNPKISDFGISRLIARDVTEHTNDVIGDNNYMDPVYRETGLLTNKSDVYSFGLVLFEIITGKKAVYGGESSFVRNYLDTYLTEIRANKMLFGKEAEEKDIEHLHNLVVISKECLDNNVDQRPEMTDIAERLQGIIRSRKFLN

SEQ ID NO: 209 - DNA, 483 bp, Oryza sativa
atggaagataaactaggtcttccagaaaataagcttagagattttatccaaggagctgacaaggcaaaatggatagctaagaataatcataacataaagtattttacagaagatgagatcaaaagaactaccagcaactacagcactagccttggaaatggttcattcggaaaagtttacaacggaatcattgatgataacactgcagttgcggtgaaaagatattcccgcatagattcagaagaagagtttgccaaagaagtaattgtccacagccaagtcaaccataagaatgtagttaggctaattggatgttgtacagagaaaaatgctccaattatggtctttgagtatgtctctaatggaaccctttgcgagaacccacatggcagtaatgttcccgtctatttggacaaaaggttgagtatagccatacaatgtgcggaagcgctagagatagttttacatatacttccaacgtaa

SEQ ID NO: 210 - protein, 160 aa, Oryza sativa
MEDKLGLPENKLRDFIQGADKAKWIAKNNHNIKYFTEDEIKRTTSNYSTSLGNGSFGKVYNGIIDDNTAVAVKRYSRIDSEEEFAKEVIVHSQVNHKNVVRLIGCCTEKNAPIMVFEYVSNGTLCENPHGSNVPVYLDKRLSIAIQCAEALEIVLHILPT

SEQ ID NO: 211 - DNA, 123 bp, Oryza sativa
atgtcctctgttaggcattcctgtagtaattttccaatctccactaaaaccttcatgttgctctcattgcaaattttgggatcaagcaattcagtcaccccctttccttcagcaagagcttga

SEQ ID NO: 212 - protein, 40 aa, Oryza sativa
MSSVRHSCSNFPISTKTFMLLSLQILGSSNSVTPFPSARA

SEQ ID NO: 213 - DNA, 1953 bp, Oryza sativa
atggatcttcaaaaaaacaagcataatgaattcatcgaaaagccaaaatggatagaggacaacatttctaatataaaggcattcacgaaagaagatataaaaggaattaccagtaactacagcaaaaggcttggaaatggtaaactcggaaaagtttacaagggtattcttgatgataaccatgctgttgtggtgaagaagtatattcatatggattctgaagaagagtttgctaaagaagtaattgtccatagtcaaatcaaccataagaatatagtcaggcttatcggctattgtactgagaaaaataatctaatgatggtcatggagtatatgtctaatggagaccttgattaccatcttcatgtcaagaatagcctcgattcattggacataagattgaacattgctatagattgtgcagatgctctagggtatatgcattccatgtgcagccctgttttacatggtgatgtcaagccctccaacattcttctagatgacagttttaatgcaaaaatatcagattttggaatatctaggcttctctcaacagacaaaactcatactgaaaatatgattacatgttatatggaccctctgtattaccaggaggggcgtctcacctcaaaaagtgatgtttatagttttggaattgttctaatggaactaatcaccaagaaaagggctacatgtctcactcaagctcttgctgaaggacaagagatgacagaattgcttgatcctatgattgctaatgagagcaacatgaaggttctactggagattgaaaaactagtgcaggaatgcctagcagaggatattgatagacgccctgatatatgtgatgtggctgcataccttcggatgcttaggaagatgagtcaacaagcaccacaagaaaattttggttggcacttgtttgcagaaacacaaaatgattttaaaaagcaaagccatcaaggtacaaacattatcagctctatcaagatggtgttccctaggatgatgggcattctcaacgtgaacatggccaaatctgaaaacaaaggaactccgctctatgttagtggcaaaagaatattcacagcattggaaataaagaaaataacaggaaactattcaagaattatcggtaaagatatgtttactgtggtctactctggaattcttgaggataacacacaggtggcagtgaagacacacaacatgtttgaacgtgggaagtggagatgtgccaatgaactgaatagcctttctgaacttatccataagaacattatcaatctgttgggtttctgctatgagatggacgctgtaatattggtttatgaattgatcgagcgagggcacctctgcaacattctccacggcaatgatactaaaagattccctctcccactagatttacgtctagacattgctattgggttggcagaaggattgtcatatatgcatagtagatcaaaacccatactacatggaaacataagaacagtcactgtacttctcgacgacaaatttgtcccaaagatatcgggttttgggtcatcaaagattggtgaagatggtaaatgcaggattgtggggagcgagatgggctacatggatgaaacattcgttaataccagagttctcacacggaagagcgatgtctatagttttggagttgttctcttggaactgattaccaggaaacgaatttattataatggtaaggacaataatactgccatcaattttgccaaagtttatgagaaagagggcagtgggagggctatgtttgacaatgagatcagtgctgacaaaaatatccctaccctcgaagacattggcattctagcaatgaagtgcttcaatccggacatagataagcgccctgaaatgaaagaagtatgcgaacaactgttgatgcttaaaaggtctagtaagaagggcaaaggaaaaatataa

SEQ ID NO: 214 - protein, 650 aa, Oryza sativa
MDLQKNKHNEFIEKPKWIEDNISNIKAFTKEDIKGITSNYSKRLGNGKLGKVYKGILDDNHAVVVKKYIHMDSEEEFAKEVIVHSQINHKNIVRLIGYCTEKNNLMMVMEYMSNGDLDYHLHVKNSLDSLDIRLNIAIDCADALGYMHSMCSPVLHGDVKPSNILLDDSFNAKISDFGISRLLSTDKTHTENMITCYMDPLYYQEGRLTSKSDVYSFGIVLMELITKKRATCLTQALAEGQEMTELLDPMIANESNMKVLLEIEKLVQECLAEDIDRRPDICDVAAYLRMLRKMSQQAPQENFGWHLFAETQNDFKKQSHQGTNIISSIKMVFPRMMGILNVNMAKSENKGTPLYVSGKRIFTALEIKKITGNYSRIIGKDMFTVVYSGILEDNTQVAVKTHNMFERGKWRCANELNSLSELIHKNIINLLGFCYEMDAVILVYELIERGHLCNILHGNDTKRFPLPLDLRLDIAIGLAEGLSYMHSRSKPILHGNIRTVTVLLDDKFVPKISGFGSSKIGEDGKCRIVGSEMGYMDETFVNTRVLTRKSDVYSFGVVLLELITRKRIYYNGKDNNTAINFAKVYEKEGSGRAMFDNEISADKNIPTLEDIGILAMKCFNPDIDKRPEMKEVCEQLLMLKRSSKKGKGKI

SEQ ID NO: 215 - DNA, 2082 bp, Oryza sativa
atggcattctggctacttgcagacctgctgattcttctagcttccgccgccgagagcgtcgccggccagcctgctgccagttgccaggctaggtgcggcgacatcgacattccctacccgttcggcatcggccccaattgctctcgcggaaagggatttgagatcgcatgcaatccccgaaacgacagcggcgagatggtgccgacccttgccgccgccaatggcaccatccatgtgcagagcctgttggtagcgccgatcccggaggtcaaggtgatgctgccggtggcgtaccagtgctactactccaacaacagcatcaccgactcgttctacggcgaggtagacctcaacaacacaggcgtgtaccgcatctccgacagccgcaacatgttcgtcgtgattgggtgcaacaccctgtcctacacccagaacgggaacagcggcggcaaaggcccttacgccggcctctactacaccggctgcgtctcctactgtaacgactcgtcgagcgcgcgggacagcatgtgcgccggcgtcggctgctgccacatcgacatctcgccgggcctcagtgacaacgttgtctccttcgggccctggaagcgtggcttccaggtagacttcagcccctgcgactactccttcctcgtcgacaagaacgagtacgagttccgtagcgccgacctcaagatggacctcaaccgaaccatgccggtgtggctggactgggccatccgcgactccgttacctgccctccactggaggtgcaggagaagaaaccggctgggtacgcgtgtatgagcgacaacagcgagtgcgtcaactccaccaacggtcccggatactactgcaagtgcaagcaaggctacgatggtaacccctacgtcgacaaggaccaaggttgcaaggacatcaacgagtgtgatgtgtccaacaagaagaaatatccctgctacggcgtctgcaacaacatcccaggggattatgagtgccactgccgtgtaggataccagtggagtggtgaaggccccaagaaacaagagtgcagcgcaaaattccctcttgcagcaaggcttgcccttggaatcactttgggattttccttcctaattgttgctgttcttttcacgctaatgatgcacaaaaagcgaaaaatgaatgaatatttcaaaaagaatggtggttcagtgctacagaaagtggacaatatcaagattttcaccaaagatgagctaaagaaaatcacaaagaataattcagaagttcttggtcaaggaagctttggtaaggtgtacaaagggactcttgaagacaatactccggttgcagtgaagacgtcaatcgaagtaaatgaagctcgaaaggatgatttcacaaatgaagtgatcatccaatcgcaaatgatgcataataacattatcaagcttttgggttgttgcttggaagtggatgttccaatgttggtgtatgagtttgccgctaaggggaatctgcaagacattctccatggtgatgccaacatccctctcccgttgggcttacgcctagacatcgcaattgaatcagctgaaggtctaaggtacatgcactcatcaacaagtcgtaccatacgacatggtgatgtcaagccggccaacatacttttaacagataagtttatccccaagatctcagattttggaacatctaagcttcttaatgtagacaaagatttcaccatgtttgttgtaggaagtatgggctacatagatccagtattccataagaccggccatttaacacaaaagagtgatgtatacagttttggagttgtactgctagagctcatatgtagaaagccaacaatatatggtgaaaattgtagcctcatcattgagttccaaaatgcctatgatcaagagaacagtgggaggataatgttcgacaaggagattgcaaatgaagaagatatcctaatcctagaagaaattggcaggttggcaatggagtgtttgaaagaaaaggttgaagagcgacctgatatgaaggaggtagcagaacgatttgttatgctgagaagatcaaggaagtgtggatag

SEQ ID NO: 216 - protein, 693 aa, Oryza sativa
MAFWLLADLLILLASAAESVAGQPAASCQARCGDIDIPYPFGIGPNCSRGKGFEIACNPRNDSGEMVPTLAAANGTIHVQSLLVAPIPEVKVMLPVAYQCYYSNNSITDSFYGEVDLNNTGVYRISDSRNMFVVIGCNTLSYTQNGNSGGKGPYAGLYYTGCVSYCNDSSSARDSMCAGVGCCHIDISPGLSDNVVSFGPWKRGFQVDFSPCDYSFLVDKNEYEFRSADLKMDLNRTMPVWLDWAIRDSVTCPPLEVQEKKPAGYACMSDNSECVNSTNGPGYYCKCKQGYDGNPYVDKDQGCKDINECDVSNKKKYPCYGVCNNIPGDYECHCRVGYQWSGEGPKKQECSAKFPLAARLALGITLGFSFLIVAVLFTLMMHKKRKMNEYFKKNGGSVLQKVDNIKIFTKDELKKITKNNSEVLGQGSFGKVYKGTLEDNTPVAVKTSIEVNEARKDDFTNEVIIQSQMMHNNIIKLLGCCLEVDVPMLVYEFAAKGNLQDILHGDANIPLPLGLRLDIAIESAEGLRYMHSSTSRTIRHGDVKPANILLTDKFIPKISDFGTSKLLNVDKDFTMFVVGSMGYIDPVFHKTGHLTQKSDVYSFGVVLLELICRKPTIYGENCSLIIEFQNAYDQENSGRIMFDKEIANEEDILILEEIGRLAMECLKEKVEERPDMKEVAERFVMLRRSRKCG

SEQ ID NO: 217 - DNA, 2247 bp, Oryza sativa
atggcattctggctacttgcagacctgctgattcttctggcttctgccgcggagagcatctccggccggcctgccgccggttgccagacacggtgcggtgacgtcagcatcccctacccgttcggcatcggccccaactgctcccatgggaagggcttcgagatcgcctgcgatacccgaacccgaaacggcagcggcgagttggtgccgaccctcgccgccgccaatggcaccatccatgtgcagagcctgtttgtagcgccgatcccggaggtcaaggtgatgctgccggtggcgtaccagtgctacaactccagcgacagcgtcaccgagagtttcttcggcgcggtagacctcaacaacaacggcgtgtaccgcatctccgacaagcgcaacatgttcgtcgtcctcggctgcaacaccatggcctacacgaacaacggggacagtcatggcaaaggcccttacgccggcctctactacaccggctgcgtctcctattgcaacgactcgtcgagcgcgcaggacggcatgtgcgccggcatcggctgctgccatgtcgacatctcgccgggcctcagtgacaacgtcgtcaccttcggcgagtggtcacgctatttccaggtggacttcaacccctgcaactacgccttcctcgtcgccaaggacgaatacaacttccagaggtcagatctccaaaaggacctcaaccggaccaagccggtgtggctggactgggcgatccgcgacggcggcaactcctccgcatcatcgtcctgccctgcgccggaggtgagggagaagatgccgcctgagtacgcctgtgtgagcgacaacagcgaatgcgtcaactccaccaatggcccaggatactactgcaagtgcagcaaaggctacgagggcaacccctacctagtcggaggttgcaacgatattgatgagtgcgctcgctcggatgaatatccctgccacggggactgcagaaacaccgtaggagattatcactgcaaatgtcgcacaggttaccagcctagaggaggcggtcccaagatagacgagtgcagccaaaagttccctctacctgcacaaattgctctcggcataagcctgggattttctttcctgatagttgctgcactttttactctaatgatgctccaaaagagaaaaattaatgagtatttcaaaaagaatggtggttcaattctacagaaagtggacaatatcatgattttctccaaagatgatctaaagaaaatcacaaagaacaattcacacgttattggccaaggaggttttggtaaagtgttcaaagggacgcttgaagataatacaatggtggcagtgaagacttcaattgaggtaaatgaagctcggaaggaggatttcacaaatgaagttataatacaatcgcgaatgatgcacaataacattatcaagctattgggttgttgcttggaggtggatgttccaatgttagtgtatgagtttgccgctaatgggagtctgcaagacattctccatggtgatgccaatcgctcactccttctcacactagacatacgcttggacattgcaattgaatctgcagaaggtctaaaatacatgcactcgtccacaaattgtaccatacgacatggtgatgtcaagcctgccaatatacttttaacagacaagttcgtccctaagatctcagactttgggacatccaagcttcttacagtagataaagacttcaccatgtttgttgttgggagcatgggatacatagacccaatattccataagactggtcgtttaacgcagaaaagtgatgtttatagttttggtgttgtattgctagagctcattagtagaaagccaactatatatggcgagaactttagcctcatcatcgagttccagaaggcctatgatgaagtacacagtgggagggcaatgtttgataaggagatcgcggtggaagaagatatctttatcttggaagaaattggtaagttggcaatggagtgtctaaaagaaaaggttgaagaacgacctgatatgaaggaagtagcagaacgacttgtgatgttgcgaagagccagaaagcatggacaaggaagctataatttgagtcctagacaccatgaggagattagtattgaaacaactcctacgagttttggtgctgattttagcacaaatagtagtgtgagtctttctgcaacatgcactccagaacgcaaagaactctacaagctatag

SEQ ID NO: 218 - protein, 748 aa, Oryza sativa
MAFWLLADLLILLASAAESISGRPAAGCQTRCGDVSIPYPFGIGPNCSHGKGFEIACDTRTRNGSGELVPTLAAANGTIHVQSLFVAPIPEVKVMLPVAYQCYNSSDSVTESFFGAVDLNNNGVYRISDKRNMFVVLGCNTMAYTNNGDSHGKGPYAGLYYTGCVSYCNDSSSAQDGMCAGIGCCHVDISPGLSDNVVTFGEWSRYFQVDFNPCNYAFLVAKDEYNFQRSDLQKDLNRTKPVWLDWAIRDGGNSSASSSCPAPEVREKMPPEYACVSDNSECVNSTNGPGYYCKCSKGYEGNPYLVGGCNDIDECARSDEYPCHGDCRNTVGDYHCKCRTGYQPRGGGPKIDECSQKFPLPAQIALGISLGFSFLIVAALFTLMMLQKRKINEYFKKNGGSILQKVDNIMIFSKDDLKKITKNNSHVIGQGGFGKVFKGTLEDNTMVAVKTSIEVNEARKEDFTNEVIIQSRMMHNNIIKLLGCCLEVDVPMLVYEFAANGSLQDILHGDANRSLLLTLDIRLDIAIESAEGLKYMHSSTNCTIRHGDVKPANILLTDKFVPKISDFGTSKLLTVDKDFTMFVVGSMGYIDPIFHKTGRLTQKSDVYSFGVVLLELISRKPTIYGENFSLIIEFQKAYDEVHSGRAMFDKEIAVEEDIFILEEIGKLAMECLKEKVEERPDMKEVAERLVMLRRARKHGQGSYNLSPRHHEEISIETTPTSFGADFSTNSSVSLSATCTPERKELYKL

SEQ ID NO: 219 - DNA, 2179 bp, Oryza sativa
gtgctagctactccagctgattcaaaccaagctaggaaaaagaaagaaacgagttaatactactacgtcgtatataaacgtatacacgtcgatggccacatgctggctacttgccagcctgctgcttttggcttccgccgccggcgacgagagcgtcgtcaccggccggcctgccggctgccaggctaggtgcggcgacgtcgacattccctacccgttcggcatcggccccaactgctcccgtggggagggcttcgagatcgcctgcaacacccgaaacggcaacggcgacctggtgccgaccctcgccgccgccaacggcagcatccatgtgcagagcctgtcggtggaacagctcccggaggtgaaggtgatgcttcccgtggcgtacaagtgctacgacgccggcgacaacgtcaccaggaggttctacggcgatgtagacctcaacaacaacggcgtgtaccgcatctccgacagccgcaacatgttcgttgtgatcgggtgcaacaccctgtcctacacacagaatgggaacagcggtggcagcaacacccactacagcggactcttctacaccggctgcgtcacctactgcaacgactcccggagcgcgcaggatggccggtgcgccggcgtcggctgctgccatgtcgacatctcgccgggcctcaccgacaacgtcgtctccttcgggccctggacgcgtggcttccaggtagacttcagcccctgcgactactccttcctcgtcgacaagaacgagtacgagttccgtagcgccgatctcaagatggacctcaaccgaaccatgccggtgtggctggactgggccatccgtgactccgttacctgccctccactggaggtgcaggagaagaaaccggctgggtacgcgtgtgtgagcgacaacagcgagtgcgtcaactccaccaacggtcccggatactactgcaagtgcaagcaaggctacgagggtaacccctacgacaaggaccaaggttgcaaggacatcaacgagtgtgatgtgtccaacaagaagaaatatccctgctacggtgtctgcaacaacatcccaggggattatgaatgccactgccgtgtgggttaccagtggagtggtgaaggccccaagaaacaagagtgcagctcaaaattccctcttgcagcaaggcttgccctaggcatcactttgggattttccttcctaattgttgctgttcttttcacgctaatgatgcaccaaaagcgaaaaatgaatgaatatttcaaaaagaatggtggttcagtgctacagaaagtggacaatgtcaagattttctccaaagatgagctaaagaaaatcacaaagaataattcagaagttcttggtcaaggaggctttggtaaggtgtacaaagggactcttgaagacaatactacggttgctgtgaagacgtcaattgaggtaaatgaagctcgaaaggatgatttcacaaatgaagtgatcatccaatcgcaaatgatgcataataacattatcaagcttttgggttgttgcttggaagtggatgttccaatgttggtgtatgagtttgccgctaagggaaatcttcaagacattctccatggtgatgccaacatccctctcccgttgggcttacgcctaaacatcgcaattgaatcagctgaaggtctaaggtacatgcactcatcaacaagtcgtaccatacgacatggtgatgtcaagccagccaacatacttttaacagataagtttatccccaagatctcatattttgggacatctaagcttcttactgtagacaaagatttcaccatgtttgttgtaggaagcatgggctacatagatccagtattccataagaccggccatttaacacaaaagagtgatgtatacagttttggagttgtactgctagagctcatatgtaggaagccaacaatatatggtgaaaattgtagcctcatcattgagttccaaaatgcctatgatcaagagaacagtgggaggataatgtttgacaaggagattgcaaaacaagaagatatcctaatcctagaagaaataggcagattagcaatggagtgtttgaaagaaaaggttgaagagcgacctgatatgaaggaggtagcagaacgacttgttatgctgagaagatctaggaagtgtggatag

SEQ ID NO: 220 - protein, 695 aa, Oryza sativa
MATCWLLASLLLLASAAGDESVVTGRPAGCQARCGDVDIPYPFGIGPNCSRGEGFEIACNTRNGNGDLVPTLAAANGSIHVQSLSVEQLPEVKVMLPVAYKCYDAGDNVTRRFYGDVDLNNNGVYRISDSRNMFVVIGCNTLSYTQNGNSGGSNTHYSGLFYTGCVTYCNDSRSAQDGRCAGVGCCHVDISPGLTDNVVSFGPWTRGFQVDFSPCDYSFLVDKNEYEFRSADLKMDLNRTMPVWLDWAIRDSVTCPPLEVQEKKPAGYACVSDNSECVNSTNGPGYYCKCKQGYEGNPYDKDQGCKDINECDVSNKKKYPCYGVCNNIPGDYECHCRVGYQWSGEGPKKQECSSKFPLAARLALGITLGFSFLIVAVLFTLMMHQKRKMNEYFKKNGGSVLQKVDNVKIFSKDELKKITKNNSEVLGQGGFGKVYKGTLEDNTTVAVKTSIEVNEARKDDFTNEVIIQSQMMHNNIIKLLGCCLEVDVPMLVYEFAAKGNLQDILHGDANIPLPLGLRLNIAIESAEGLRYMHSSTSRTIRHGDVKPANILLTDKFIPKISYFGTSKLLTVDKDFTMFVVGSMGYIDPVFHKTGHLTQKSDVYSFGVVLLELICRKPTIYGENCSLIIEFQNAYDQENSGRIMFDKEIAKQEDILILEEIGRLAMECLKEKVEERPDMKEVAERLVMLRRSRKCG

SEQ ID NO: 221 - DNA, 1839 bp, Oryza sativa
atgaagaggaagaggaggagaaggagaagcgggaaaggaaatgtaccgccttcctcaccaccgacggccatactggctgctgtctttgttgacagcgaccaaaccgtcgacctcgtccacccctccctcggagtccgcaaactgcacgctgttgtcgccgaccgggtgagccttgtaccacagcagatcttggcctcgctcgcgcgcccccgccgcgcgcgccgcgtcccccacaacgaggggactgacctcaccgccaccatcgcgcgcgagggcttcgacagctacgtcctcgccgtcctccgccgctcccaccgcgagtgccgcggtggccgctcccgccccgggaagaaggcggtggctgcgacagcgggggaccgagcccggcatcctgaagcgcctccccccgatggatctggcctccctggcctcgaccccctcgcaggcggcgatatagatgagtgcgctcttccgggtattatgagcaattgctcctttaatagcgtatgcgtaaacagaccaggaggctttgattgtccatgcaaacgaggaatgacgggcgacggcaaaagaggaacatgcaccgagaatttcccaccagcagcaaaagccgctgtcggcctttcttccttcattgttttcatcgtcctaatttttatggtgaaacaacacctaaaacttaagaagttctacgaacaaaatggtggtccggtattgaaaggtgtgagaaatataaagatctacacaaagaaagaactgaaacaaataacgagtaactatagcagcgacattggagaaggagcctctggtaaagtttatatggggactcttaagggcggacaacaagtggctataaagaagtccaaaaaagttgatgaagaaagaaaaagtgaattcactcaagaggtcatactccaatctgaaatgaagcacaagaatataatccagctctttggttgttgccttgaagttgatgttcctatgttagtgtatgagtttaccgtgaaaggaagtttacatgatgtcctcttcaaatgtgatgagaatatgaaagggaatttacatgacgttctacccaaatacaatgataacaagaaagggaaagggaaagggaaagggaaagtacacgacgcactcgttgaatgtgatggtaacaaaaatgtgagtttgcatgatgtcctcttcaaatgcggggataaaattgcaatagatacacttctggagatcgctattggatcagctgaaggactaacttatatgcatacagcacgggagactcccatccgtcatggtgatctcaaatctggtaatatacttatagacaataatttcgtccctaaaatttcagactttggaacatcaagatcactggttgcaggtcataaatttaggcctgataaattcattcctgcggacatgaattatatagatccagtatatatggaagatggaatgctcacggagaaaagtgacatctatagctttggaattgttcttattgaacttgttacaaggaagcccgcaaaatatgatgacgacaggagctatgttcgaaacttcattcaggcctaccttgataaaagagaaagggaaaaatgccataaagagattacaccagatgtggaaattaatattcttgaaatggataaacgccctgatatgatagaagtagaacggcagctccatcgaattagacacattgcaggccaaaggatagaggaaaaaaaagaggaatttcaacgtgcattccctagaacgggatcggttatctcaaacgggtttaaagcctcgtctctttcaggtagggtccctgtcactaagcaaaggtcactaatgtga

SEQ ID NO: 222 - protein, 612 aa, Oryza sativa
MKRKRRRRRSGKGNVPPSSPPTAILAAVFVDSDQTVDLVHPSLGVRKLHAVVADRVSLVPQQILASLARPRRARRVPHNEGTDLTATIAREGFDSYVLAVLRRSHRECRGGRSRPGKKAVAATAGDRARHPEAPPPDGSGLPGLDPLAGGDIDECALPGIMSNCSFNSVCVNRPGGFDCPCKRGMTGDGKRGTCTENFPPAAKAAVGLSSFIVFIVLIFMVKQHLKLKKFYEQNGGPVLKGVRNIKIYTKKELKQITSNYSSDIGEGASGKVYMGTLKGGQQVAIKKSKKVDEERKSEFTQEVILQSEMKHKNIIQLFGCCLEVDVPMLVYEFTVKGSLHDVLFKCDENMKGNLHDVLPKYNDNKKGKGKGKGKVHDALVECDGNKNVSLHDVLFKCGDKIAIDTLLEIAIGSAEGLTYMHTARETPIRHGDLKSGNILIDNNFVPKISDFGTSRSLVAGHKFRPDKFIPADMNYIDPVYMEDGMLTEKSDIYSFGIVLIELVTRKPAKYDDDRSYVRNFIQAYLDKREREKCHKEITPDVEINILEMDKRPDMIEVERQLHRIRHIAGQRIEEKKEEFQRAFPRTGSVISNGFKASSLSGRVPVTKQRSLM

SEQ ID NO: 223 - DNA, 1095 bp, Oryza sativa
atgatcagggtgctgatcctcctcaccctaggcttcctagaagcaattgctgagaaaccagcagcacagcagccgacggaactccaaggctgccccgcccccgatatgtgcggcaacatcaccataccccatcccttcggcatcaaacctggctgctacctcgccggcttcgaggtcatctgcgaccgcacgttcaacccgccgcgagccttcctcgcaggcgacccgccattgttcggcgacaagttgccgccgaacgttaatagcagtaaaccattcacggtgacggccaatttctactactctggcacagatgcaggcatgcccagcgaaatggtcaactacacccgagggcctctcgagctcctcgacatctcggttaatcagagcaagctacgtgtttatgcagccatcaactccgactgcagcacgaatgaaacacaccatatcctatttgagcagtcaatcaagcttcagccgtcaggtccattcaccctgtcggcaaatgataattccctagttggcgtcggccaaaacgtcatcgcgatgttcgcggattcatacgccggagaagaatactcgacgatttgcctgtctttcctcagttcagtgtccaaggcgaggaatggaccgtgcgagaatgccacggggcttggctgctgccagcagacactgcctcctggcgtcaacacgactcttgtgagattccagcacaggaacaacagcaagtggagaacctatccatgctcatatgccatgctggtggagaagtcatggtacaatttctctacagaagatctgtttgagtaccctgcttttcccaacaagtaccccaggggtgtactaccggacaagtatcctacgggtgtaccccttgtgcttgactttgctatcaggaatgggtcctgcccacaggaaaatcgtggcccacctggaaaagactatgcttgtgtcagcggcaacagctcttgcctcgatgcaggaaagggccgaggatataaatgcgagtgcaaagagggctacaatggtaatccttatatgcctaatggatgccaaggcactcctactgaaccccctacaggtgacggctcatag

SEQ ID NO: 224 - protein, 364 aa, Oryza sativa
MIRVLILLTLGFLEAIAEKPAAQQPTELQGCPAPDMCGNITIPHPFGIKPGCYLAGFEVICDRTFNPPRAFLAGDPPLFGDKLPPNVNSSKPFTVTANFYYSGTDAGMPSEMVNYTRGPLELLDISVNQSKLRVYAAINSDCSTNETHHILFEQSIKLQPSGPFTLSANDNSLVGVGQNVIAMFADSYAGEEYSTICLSFLSSVSKARNGPCENATGLGCCQQTLPPGVNTTLVRFQHRNNSKWRTYPCSYAMLVEKSWYNFSTEDLFEYPAFPNKYPRGVLPDKYPTGVPLVLDFAIRNGSCPQENRGPPGKDYACVSGNSSCLDAGKGRGYKCECKEGYNGNPYMPNGCQGTPTEPPTGDGS

SEQ ID NO: 225 - DNA, 2121 bp, Oryza sativa
atgttgatgatcctgccctgtagattgctgctgcgtctagtcctcgcaacccttctgattttggctgctagtacagatcaacatgtagccacgctgccgccgataacacttccaggctgcatcgacaagtgcggcaacatcagcatacccttcccgttcggcacgaagcagagcagttgcttccttccaggcttcgaggtcacctgcaacgacacattcagtccacctcgcctcttcctcggaaattctaatcctggagacaggcaaaactatcaggaatttgaagagcgctactacttgacgacggaggaaggcatgccgacacatctcatgactgatgattttttgttcatggagctgatgagcataaacctcacagagggcgtagcacgggcatatggccctgtgagctcggattgcagcctcaacgacacatatcatttggtgaagaggcagatgacgggcttggccgggccattcctcatctccacgcgcaatgctctcacagccgtcggctggaacatggaagcaaacctcgcgagatcggtgcgtggatccggcttcctcaagacctgtggtgtgcggctcgggcaacctgaatttgcaacgaatgggtcatgcctgggaggaggctgctgccagggtgaaatcactcaaggcattggctctatcgcgaaggactggtacaacttcacttcgccggacctctattccgacaacttctccaagaaatatccaaagggtgtcccgctagtgattgacttcgccatcagggatggtttttgcccagcggcaggccaggcgccgccggcgaactatgcttgtgtcagcagcaacagctcatgcgtcaacgtgaccaacggtgatggttacatctgcaactgtagtaagggatatgatgggaatccttacatacctaacggatgtcatgatattgatgaatgtgccctccgagatagccatcctgagctccgagtcctgtatccttgttcaagaaatggaatctgcatgaacagaccaggcggatatgattgtccatgcaaacgtggaatgagcggtgatggcaaagcaggaacttgctcagagaaatttcctttacaggctaagattgttgtaggtgcaataggtggtctctttattgtcgcagtccttgtgttccttgcacttgttcacagagagaaaaggaagatgagagaattttttgaaaagaatggtggtcctatattagaaaaagtcaacaacataaagatattcaagaaagaagaactcaaaccaattctgaaagctagcaatattattggaaaaggtggattcggagaggtttacaaaggccgtcttgctgataacaaactggtggccgtaaagaagtccatcaaagtcaatgctgcacaaaaggatcaatttgcaaacgagatcatcatccaatcccgagtcatccataagaacattgtcaagctgataggttgttgcgtagaagttgatatcccaattttagtatatgaatttatcactaatggcagtctcgatgacattcttcacggtagtaacggagaacctctcagtttggatttacgtttggatattgctgccgaatcagccgaaggtctggcatatatgcattcgaaaaccaccaatacaatcctgcatggtaatgttaaaccagctaacatacttttggatgacaactttgttccaaagatatctgattttgggatttcgaggctaattgccgtagataaaaatcaacacacagataaagtcattggtgacatgagttatatggatccagtttacctacaaacaggactattaacgaagaaaagtgatgtctacagttatggggttgttctcttggagctcatcagcaggaagaaggccacatattctgacaacaatagcttagttcggaattttctagatgctcacaaagagaaaaggaaagcaactgagctgtttgataaggatatcacgctggcagaagacttggacgttcttgatggtctcgtgaggattgctgtggaatgtttaaaccttgacgtggatcaacgaccagaaatgacaaaagtaacagacgatcttttcatcttgatgaaatctcgagctaaagagaccaagcagtaa

SEQ ID NO: 226 - protein, 706 aa, Oryza sativa
MLMILPCRLLLRLVLATLLILAASTDQHVATLPPITLPGCIDKCGNISIPFPFGTKQSSCFLPGFEVTCNDTFSPPRLFLGNSNPGDRQNYQEFEERYYLTTEEGMPTHLMTDDFLFMELMSINLTEGVARAYGPVSSDCSLNDTYHLVKRQMTGLAGPFLISTRNALTAVGWNMEANLARSVRGSGFLKTCGVRLGQPEFATNGSCLGGGCCQGEITQGIGSIAKDWYNFTSPDLYSDNFSKKYPKGVPLVIDFAIRDGFCPAAGQAPPANYACVSSNSSCVNVTNGDGYICNCSKGYDGNPYIPNGCHDIDECALRDSHPELRVLYPCSRNGICMNRPGGYDCPCKRGMSGDGKAGTCSEKFPLQAKIVVGAIGGLFIVAVLVFLALVHREKRKMREFFEKNGGPILEKVNNIKIFKKEELKPILKASNIIGKGGFGEVYKGRLADNKLVAVKKSIKVNAAQKDQFANEIIIQSRVIHKNIVKLIGCCVEVDIPILVYEFITNGSLDDILHGSNGEPLSLDLRLDIAAESAEGLAYMHSKTTNTILHGNVKPANILLDDNFVPKISDFGISRLIAVDKNQHTDKVIGDMSYMDPVYLQTGLLTKKSDVYSYGVVLLELISRKKATYSDNNSLVRNFLDAHKEKRKATELFDKDITLAEDLDVLDGLVRIAVECLNLDVDQRPEMTKVTDDLFILMKSRAKETKQ

SEQ ID NO: 227 - DNA, 1017 bp, Oryza sativa
atgagatcgaagtttcttccaacgctgctccccgcgataaccgttctcttggtcatgcaggccatatcacggatgacgaccgtggcagtggaccaacggtcgccacgacgtcggatcgcactccccggatgccccgacaagtgcggcgacatcagcatcccttacccgttcggcaccaaagaaggctgctacttggacatcaacttcatcgtcctctgcaacctgtccaccacgccccccgccaccgccgctggaaccatcattctgaagggtaacggctactacttcggggaccaggaaaatccggtgggcgtccagaccaacaaatcctggtggaccgtggatctcatcgacatcgacgtgacgcggggcgaggtgcgggtggccgtgccggtcagctccgactgcagcactaacgagagctaccacgagctcagcatcttcacccaaagcctcaacttctcgacgacgttcctcttctccgcgacgaggaacgtgctgttgggcgtcggccagagcgtgagagcccggatcgacggcgtgatgagcggcacaaactactccgccgcctgcaactcgctgttcgacacgccggcgaaggcggagaacgggacgtgcatggggctcggctgctgcgaggcggagctcgcgccggagcttggcatgatcacggtctctatgtacaagcagagcaacagcatgtgggagacgttcccgtgcacctacgccatggtggtcgagaggtcgtggtacaacttctccctgcaggacctttacggatacgatgttctcgacaagaaatttcccggcggagtgccgcttgtgctcgacttcgccatcaggaatgaatcttgtccagcagaaggcaaaccgttgcccacggcttgccgtagtagcaacagcctctgcgtcaacacgaccaacggccagggatatgtctgcaagtgccaggaaggttacgagggcaacccgtatctaccagatggatgccaaggtaatttgatactgagggagtaa

SEQ ID NO: 228 - protein, 338 aa, Oryza sativa
MRSKFLPTLLPAITVLLVMQAISRMTTVAVDQRSPRRRIALPGCPDKCGDISIPYPFGTKEGCYLDINFIVLCNLSTTPPATAAGTIILKGNGYYFGDQENPVGVQTNKSWWTVDLIDIDVTRGEVRVAVPVSSDCSTNESYHELSIFTQSLNFSTTFLFSATRNVLLGVGQSVRARIDGVMSGTNYSAACNSLFDTPAKAENGTCMGLGCCEAELAPELGMITVSMYKQSNSMWETFPCTYAMVVERSWYNFSLQDLYGYDVLDKKFPGGVPLVLDFAIRNESCPAEGKPLPTACRSSNSLCVNTTNGQGYVCKCQEGYEGNPYLPDGCQGNLILRE

SEQ ID NO: 229 - DNA, 1395 bp, Oryza sativa
atggagggcaacggcacattccccttcttctctcagttttcgtcggatccgggctcctccgctgccggcttcaacctctcctccgctgccgggttctatggatgctcttcatgtagtatgctagcaatgcttttcattcaggaaaacagcagagcaggctgcgcgggaacgatggagggagaggcagacattgatgagtgtgagcttcgagatgaacaacctgcgctacgagatcagtaccggtgctatgggatttgcaagaatacgatagggggatatgactgtcaatgcaaatttggaacgaaaggtgatgccaaaactggaacatgcacacagctgtttcccctccctgcaatggtggctacacttggcataatcggtctcacatccatagtggttgttgtagtattgtttaagcttttgtttgacgagaggagaaaaacaaaagagtttttcataaagaatggtggcccggtactagaaaaggtagacaacattaagattttcaaaaaagaagaacttaagccaataatacaatcatgtaatgttattgggaaaggtggatttggggaggtttacaaaggactcattgacgataaactcgttgcaattaagaaatccattaatgtagacaagttacaagagaagcaattcacaaatgaaattattatccagtcaaaagtcatccataagaacatcataaagctcataggttgctgtctagaggttgacgttccaatgctggtctatgagtttgttccacggggaagcctccacgacatactacatggcaataggaaagagtccctccccttacagaaacgtttgaatattgcagcaggagcagcagaaggattagcttatatgcattcaaaaacctctacaactattttgcatggtgatatcaaacctggcaatatacttttggacgaaaactttgatcccaaaatatctgactttggaatatcaagattgattgctatagataaaacccatactaaatgtgtgattggagatatgtgttatatggatccaatatatcttcaatcgggcttgttgacgaagcagagcgatgtatacagttttggagtggtgctcttagaacttcttacgagacaaaaggcaagttctggtgaagatactagactggttacgacgtttctagatgcatatacagaagatcataagggcgctatcgatctttttgacagagaaattttattggagggcgacacagaagtattcaacaatcttgccatcctagtagtggattgtctgaagttcgaagtggaaagaaggccagaaatgacagatgtagaagaacgacttcaaaccatgaagagatcttatgtgccaaaaagcatatctgatgctagtagcagtatagatacataa

SEQ ID NO: 230 - protein, 464 aa, Oryza sativa
MEGNGTFPFFSQFSSDPGSSAAGFNLSSAAGFYGCSSCSMLAMLFIQENSRAGCAGTMEGEADIDECELRDEQPALRDQYRCYGICKNTIGGYDCQCKFGTKGDAKTGTCTQLFPLPAMVATLGIIGLTSIVVVVVLFKLLFDERRKTKEFFIKNGGPVLEKVDNIKIFKKEELKPIIQSCNVIGKGGFGEVYKGLIDDKLVAIKKSINVDKLQEKQFTNEIIIQSKVIHKNIIKLIGCCLEVDVPMLVYEFVPRGSLHDILHGNRKESLPLQKRLNIAAGAAEGLAYMHSKTSTTILHGDIKPGNILLDENFDPKISDFGISRLIAIDKTHTKCVIGDMCYMDPIYLQSGLLTKQSDVYSFGVVLLELLTRQKASSGEDTRLVTTFLDAYTEDHKGAIDLFDREILLEGDTEVFNNLAILVVDCLKFEVERRPEMTDVEERLQTMKRSYVPKSISDASSSIDT

SEQ ID NO: 231 - DNA, 3038 bp, Oryza sativa
ggcaaaggctgaaaggcatagctctagacacacttatatttaaacttctgagagggtagcagcttggcagagtttagatgggccacctcaacaccatgttacctttgctttcattcgtgttattggggatagctcaagtcaagagaagctttgcactcagtccagtcctctcctatggccatctcatcaccccatatccagagggtatgaccagacggttggagaaaaggttcctactggatcatggtaccaatccaagtccttctaatgcatccctaccctccacttctacactcgctcgctgtccaaagagatgcggcaaattgagcttcgattatccctttggcataggacaaggttgtttccgccatgtcgatttcagtctcacatgcgacatggccactcagcctcctaaactcttcctgaacaatggatcgacagaggttcttggtgatattggggtagatggtctgaatatctattttatccacttcaacttaattccgatcacctccacccatgtcatccctataaattccggtggtgatgtctacaacttttcatggaaaaatccaggggattcttttacctttgcacgacagggcatgacatttgttgtcaccagctgtgacttggatgtatacatggtagatcaagaaaaaagcacacctattttgcttggcactatcgcttgtcccagcaaagagattgctgagatggtatacagacaggattctgaaggccctggttggtacactatagattcactaccagctcggacagttcagttacagtttgttcgtcacaagaccggtaatacccaaaagtactttaatctaaccatgttgtgggatagaatcaacattactgtgaaggccaaccttgcttggaatattgtggaccaaacaagatgcttgaataacatggaggatgacaggaagaaccatgcttgtatcagcaatcacagttcatgtgtctcctcgcagtatattgatgttggctatgcatgccggtgcaatgatggctacgttggaaatccctatattatggatggctgcaaactcgatgacggttataacccaagaccacaaaaacataattgctctcgacaatgtggaacaatcgttgtcccatttccttttggccttgaagagggttgtgccgccagggaagtgtttcagctctcgtgcctaggcaagccaaattctgtgctgcagtacaatgacttcatcggtgttcagtatataaatgtcagtgaggggcttgttggcattaaatacaactcatctttcgtggagatcttattcaatatgttttcgcaattcagattttcatctcaaggagtagtatccaacatatttggtaaagggcctaacctgtatgtggatccaacggaatcagcctcggtgcagtgggcagttgccaatctgacctgccaacaggcgcagcaaaacacttcgacatatgcttgtgtaagtaccaatagctcctgctccagggtcatcagcaccatgcaaggttatgttggctacaggtgtacttgtttgcctggttatgatggaaatccatatatcccagatgggtgtaaaggtattataattggccttaccattggatttggtgtgttgattcttagctcgattgtaatagctatcattagaagatggaaaagagatgtccataaaaaaatacggagaaaatatttccaaaagaaccaaggcctcctcctagaacaattgatatcatcagatgaaagtgctagtgagaagacaaagattttctccatagaagagctaaaaagggcaacaaataactttgattccacacgtatcctagggcatggaggacatggcactatctacaaaggtatcttatcaaaccaacatgtggtagccataaaaaaagccaaagtcataaaggaaggtgagatcaacgatttcatcaacgaggttgccatactttctctaataaatcacagaaatattgttaaactctttggatgttgtcttgaaactgaggtccccttattagtctatgactttatcccaaacggttcattatttgaacttcttcatcatgattcaagtagcacattcccattgtcatggggcgaccgcttaaggattgcagcagaggccgcaggagctctatgctatctacattctgcagcatctatatcgatcttccaccgtgatgtgaagtcctctaatatactgttggatgcaaattataccgctaaagtttcggatttcggcgcttcaagatctgttccagttgaccaaagccatgttgttacaaatgtacagggcacgttcggttacttggatccagaatattaccaaaccgggcagctaaatgagaagagtgatgtctacagctttggtgtggtactcttggagcttcttctaagaatgcaacctatttttacaacaatgtcagggatgaaacaaaatttgtgtacttacttcctttcggagattaagaccagaccaattatagatttggtagatcctccggttcttgacaaggcaaatgaagaagatattagacaagttgcctcccttgctgagatgtgcataaagctaaaaggtgaagaaaggcctacaatgaggcaagtagagataacactgcagcttttacgaacagaaaagatgaccccatcacatgttagtccagacagaaaccaagagatagaatcactactgactcaaggagccattgaccaagtgattcatgctttagtaaatgttgacagagctaatgtagcatctcaacgctctcaaacctcatgctatagcttggagaaagaattcttgtcatctgctagcctaccacggtagaagtgtttatcctttgtcccttgtgtttggcgttctttgtacttaaaacatttcctgtgttcatagcacaaatttacatacatgtgtaccgtttatattgtaatgtttgtatatggtagttgtactcggttcagtataaaccacatcttaatgtatggactcaagaatgtttattgcataatattaatttagaggatt

SEQ ID NO: 232 - protein, 920 aa, Oryza sativa
MGHLNTMLPLLSFVLLGIAQVKRSFALSPVLSYGHLITPYPEGMTRRLEKRFLLDHGTNPSPSNASLPSTSTLARCPKRCGKLSFDYPFGIGQGCFRHVDFSLTCDMATQPPKLFLNNGSTEVLGDIGVDGLNIYFIHFNLIPITSTHVIPINSGGDVYNFSWKNPGDSFTFARQGMTFVVTSCDLDVYMVDQEKSTPILLGTIACPSKEIAEMVYRQDSEGPGWYTIDSLPARTVQLQFVRHKTGNTQKYFNLTMLWDRINITVKANLAWNIVDQTRCLNNMEDDRKNHACISNHSSCVSSQYIDVGYACRCNDGYVGNPYIMDGCKLDDGYNPRPQKHNCSRQCGTIVVPFPFGLEEGCAAREVFQLSCLGKPNSVLQYNDFIGVQYINVSEGLVGIKYNSSFVEILFNMFSQFRFSSQGVVSNIFGKGPNLYVDPTESASVQWAVANLTCQQAQQNTSTYACVSTNSSCSRVISTMQGYVGYRCTCLPGYDGNPYIPDGCKGIIIGLTIGFGVLILSSIVIAIIRRWKRDVHKKIRRKYFQKNQGLLLEQLISSDESASEKTKIFSIEELKRATNNFDSTRILGHGGHGTIYKGILSNQHVVAIKKAKVIKEGEINDFINEVAILSLINHRNIVKLFGCCLETEVPLLVYDFIPNGSLFELLHHDSSSTFPLSWGDRLRIAAEAAGALCYLHSAASISIFHRDVKSSNILLDANYTAKVSDFGASRSVPVDQSHVVTNVQGTFGYLDPEYYQTGQLNEKSDVYSFGVVLLELLLRMQPIFTTMSGMKQNLCTYFLSEIKTRPIIDLVDPPVLDKANEEDIRQVASLAEMCIKLKGEERPTMRQVEITLQLLRTEKMTPSHVSPDRNQEIESLLTQGAIDQVIHALVNVDRANVASQRSQTSCYSLEKEFLSSASLPR

SEQ ID NO: 233 - DNA, 3023 bp, Oryza sativa
gcacatgcttagctagacatgcttatgttgttactaaacatacgtagacaagtccaaactttatacttgagagaatcgagtatctctgtagcaagagttcagatgggccacctcaatatcatgttagctttcctttcatttgtgttattagggttagctgaagtcgagggaactgtagcactgagtcaaatcctctcaaatagccatctgatcaccccgtaccgagaggttacggcaagaaagtttgagagaaggtccttactgcaggatcatagtagtgatgataggagatcatctaatgcaagccttccctctgctgccacacttgctaactgtccaaagcgatgcggcaacttgagcttcgactatcccttcggcataggagatggttgtttccgccatcccgatttcagtctcacatgcaacgccactactcagcctcccaaactcctcttgcatattaacgaaagcgtggaggttatagataatattgaggtcgtcgagatgatgataattactgtcgtcagctgcgacttggatgtattcttgataggccaagacaacactcctaaactgctttgcatggttgcttgtcccaacaaagagattgcagacatggtgtacatgcaagactgtgaaggccctggctgttgtactgtattatctgaaacaccagttcaggctgtacaattgcagtttgttcgccatgagacaagtaatgctggaaaaatctccaatctcagcatgctatgggatagaatcaacataactattggggcgccacttgtttggagtattgttgaccaaacaagatgctcaagaaacatggaagataacttcgcttgtgtcagcaaccacagtgggtgcataacttctgtgtttagagatattggctatgcctgccaatgcaattctggctacaagggaaatccttttatccttgatggttgcaagcatgacagcggttacaaccctagaccagaaaagcataattgcgctcgacaatgtgggacaatcacagtcccgtttccgtttggccttgaagagggttgctccgcaaggaaacgttttcagctcaactgctccgacaagacaaattcggtcctcaagttcaatgactattttcaggtgacgtatataaatgtcagtgaaggacttctgggcatcaaacacaactcatcgctggaggagcaactattcaatataatgatggaaatgatgacttctgataatgagccagacctatttgttgaccctcttgaatcagtctctgtgcaatgggccgttgccaacctgacatgccaagaggcgcaacacaacacttctggatatgcatgtgtaagtaccagcagctcctgcttgaatgtccttagctccatggatggttatgttggctacagatgcagttgcttgcctggttatcgtggaaatccatacatcctagatggctgcgaagatatcgacgagtgccgagagacaccaggaatttgtaaaggagtttgcaagaataccgttggaaactacagctgcaccaagtgccctgatcataccgagtacgatattttaagaatgcagtgtactccaataagaaagaaaagcttctacttaggtattataattggccttagcagtggctttggaatgctacttcttggattaagtggaatagttctcattcgaagatggaaaagacatgcacagaaaagactgcagacgaagtatttccgaaagaaccagggccttctattggaacaattgatatcatcggatgaaaatgctagtgagaagacaaaaattttctccttagaagagcttaaaaaggcgacaaataactttgataccacacgtatccttggccgtggagggcatggaacagtatacaaaggtatcttatctaaccaacatgtggtggctattaaaaaggccaaagttataagggaatgcgagattaatgatttcatcaacgaggtttcgattctttctcagataaatcaccgaaatattgttaaactctttggatgctgtcttgaaactgaggtccccttattagtctatgattttattcccaatggttcattgttcggactacttcatccagattccagtagcacaatctatttatcatggggtgactgcctaaggattgcagcagaagcagctggagctctatattatctccactctgcagcatcaatttccatcttccaccgtgatgtgaagtcatctaatatactcttggatgcaaactatactgctaaagtttcagattttggtgcttcaagatcagttcccatcgatcaaacccatatcatcacaaatgtacagggtacatttggttacttggatccagaatattaccaaactaggcagctaaatgagaagagtgatgtctatagttttggtgtggtactcctagaacttcttctgagaaagcaacccatttttacaataaactctgggatgaaacaaaatttgtgtagttacttcctttcagagattaaaaccaggccaattacagatatggtcgatgctcaagttctcgaagaagcaaatgaggaagatatcaaagaagttgcatcccttgctgagatgtgcttgaagctaaaaggtgaagaaaggcccacgatgaagaaagtagagatgacgttacagcttctgcgaacaaaaacgatgaactcatctcaagtagatccaaccattgaccaagagattcaaactgttctgactgaaggagccagtgacccagagatacaaccattagtaacaaatttggatgttgatagagctaatgcagcatctcaacgcttccaaatatcatgctatagcttggagcaagaattcttgtcatctgctagcttaccacggtagatgtgtttatcctatttctgatgtgtttagttaacttgcatatgtattgtgtacttgcagtcatgtatgttgaaatgagaaattatactatatgccatcaacaaggagctaattctgcaatatgctattgatgaatgcaaattgtctaacgtact

SEQ ID NO: 234 - protein, 662 aa, Oryza sativa
MFPTCIPFYQKQREHLEMGHNMEFLLMPGYNPRPEKHNCARQCGTITVPFPFGLEEGCSARKRFQLNCSDKTNSVLKFNDYFQVTYINVSEGLLGIKHNSSLEEQLFNIMMEMMTSDNEPDLFVDPLESVSVQWAVANLTCQEAQHNTSGYACVSTSSSCLNVLSSMDGYVGYRCSCLPGYRGNPYILDGCEDIDECRETPGICKGVCKNTVGNYSCTKCPDHTEYDILRMQCTPIRKKSFYLGIIIGLSSGFGMLLLGLSGIVLIRRWKRHAQKRLQTKYFRKNQGLLLEQLISSDENASEKTKIFSLEELKKATNNFDTTRILGRGGHGTVYKGILSNQHVVAIKKAKVIRECEINDFINEVSILSQINHRNIVKLFGCCLETEVPLLVYDFIPNGSLFGLLHPDSSSTIYLSWGDCLRIAAEAAGALYYLHSAASISIFHRDVKSSNILLDANYTAKVSDFGASRSVPIDQTHIITNVQGTFGYLDPEYYQTRQLNEKSDVYSFGVVLLELLLRKQPIFTINSGMKQNLCSYFLSEIKTRPITDMVDAQVLEEANEEDIKEVASLAEMCLKLKGEERPTMKKVEMTLQLLRTKTMNSSQVDPTIDQEIQTVLTEGASDPEIQPLVTNLDVDRANAASQRFQISCYSLEQEFLSSASLPR

SEQ ID NO: 235 - DNA, 912 bp, Oryza sativa
atggagcttttgcttcttgtgtttcttcttctggcggctatgtcagccgccgtggagagcatcacgagcacggcggtgaaaacggggtgccaggagcgctgcggcggcgtggacatcccctaccctttcggcatcgggcccggatgctcccgccacggcttcgagctctcgtgtgtcagcaacggcagcggcgccggcccgatcgcggtgctcgccggcacgtcgatccaggtgacgcgcctgtccgtcgagccggccgagtcgcaggtgatgctccccgtggggtggcagtgctacaacacctcgcagccgaccaggacataccccgactggagccgcgcgaagacggagatgaaccgcggcggagtgtaccgcatctccaacacccacaacatgctggtcgtgctcggctgcaacaccgtcggctacactgagagcttgaggagcgagggaggcgcctactccagcacatactacatcggctgcatgtcctactgcaacaactcggcgagcgcgcaggacggccagtgcgccggcgtcggctgctgccacgtcgacatcccaccggggctcaccgacagctccgtcaacttccgggtgtacgaccacaccggtatggtggactacagcccctgtgactacgccttcctcaccgaccggaccaactacagcttccggcgagccgacctcatcaagatggacaagaaccggaacgttccggtgtggcttgactgggcgatccgcgagaacggctccatgtcctgcgctgaggccaagggcaagccagggtacgcctgtgtcagcgtccacagcgagtgcgtcgactctactaatggtccgggttacaactgcaagtgtaccgcaggctacgagggaaacgcctatgctcctgatggatgtactagtaagtaa

SEQ ID NO: 236 - protein, 303 aa, Oryza sativa
MELLLLVFLLLAAMSAAVESITSTAVKTGCQERCGGVDIPYPFGIGPGCSRHGFELSCVSNGSGAGPIAVLAGTSIQVTRLSVEPAESQVMLPVGWQCYNTSQPTRTYPDWSRAKTEMNRGGVYRISNTHNMLVVLGCNTVGYTESLRSEGGAYSSTYYIGCMSYCNNSASAQDGQCAGVGCCHVDIPPGLTDSSVNFRVYDHTGMVDYSPCDYAFLTDRTNYSFRRADLIKMDKNRNVPVWLDWAIRENGSMSCAEAKGKPGYACVSVHSECVDSTNGPGYNCKCTAGYEGNAYAPDGCTSK

SEQ ID NO: 237 - DNA, 1176 bp, Oryza sativa
atgcacactgaaaaccacacaatatttgtaggcatcactcttggcatttcctttttgatcgttggtctcctattcattctaatgatgcgccaaaagagaagaatgaatgaatatttcagaaagaatggtggttcagtactacagaaagtagagaacatcaagatttttaccaaggatgagcttaagaaaataacaaagaacaattcagaagttcttggtcaaggaggctttggcaaagtctataaagggattcttgaagataacaccttggtggcagtgaaagcctcaattgaggtaaatgacgctcgaaaagaggattttaccaatgaagttatcatccaatctcaaatgattcacacaaatatcatcaagctcttagggtgttgtttggaggtggatgttccaatgttggtttatgagtttgctgcaaatggaaatctacaagacattctccatggtgacaacaaccgtcgagtcccactcccacttgacttgcgcatggacattgcagttgaagctgcagaagggctaagatatatgcactcatccgcaaaccgcaccatacgacatggtgatgttaaaccagccaacatacttctgaatgacaaattcaaacctaagatttcagacttcgggacatccaagctgcttaccgtggataaagacttcactatgtttgtagtggggagcatgggttacatagaccctgtgtttcataaaaccgggcgtttaacacaaaagagtgatgtctacagttttggagtcgttctattagagctcatcaccaggaagccaacaatatatgatgctaattgcagtctcttaattgacttccaaaaggcctatgagcaagaaaatagtgggagggcaatgttcgacaaagattttacaattgaagaagaaatattcattttggaagaaattggtcgattagcaatggagtgcctgaaagaaaaggttgaagaacggcctgatatgaaggaagttgcggaacaacttgtgattctaagaagatctaggaagagcagacaaggaaactacaacataagtccacaacaatttgaggagatgagtactgaaggaactccattgagcttggaaactgctgttagtgtaagtagctcagtcctttctgctccatccactccagccaacaatgacttctccaacgcttag

SEQ ID NO: 238 - protein, 391 aa, Oryza sativa
MHTENHTIFVGITLGISFLIVGLLFILMMRQKRRMNEYFRKNGGSVLQKVENIKIFTKDELKKITKNNSEVLGQGGFGKVYKGILEDNTLVAVKASIEVNDARKEDFTNEVIIQSQMIHTNIIKLLGCCLEVDVPMLVYEFAANGNLQDILHGDNNRRVPLPLDLRMDIAVEAAEGLRYMHSSANRTIRHGDVKPANILLNDKFKPKISDFGTSKLLTVDKDFTMFVVGSMGYIDPVFHKTGRLTQKSDVYSFGVVLLELITRKPTIYDANCSLLIDFQKAYEQENSGRAMFDKDFTIEEEIFILEEIGRLAMECLKEKVEERPDMKEVAEQLVILRRSRKSRQGNYNISPQQFEEMSTEGTPLSLETAVSVSSSVLSAPSTPANNDFSNA

SEQ ID NO: 239 - DNA, 1277 bp, Oryza sativa
atggatcgatttgccatgccatgccaggtctctgttgacctcgtccatcgccattcgccaatcggtgtagctatgctgctagctgatcgatcagttatggcgatccagcaaccacgagctctcaattatgaaggcagccgtaatcacacgcagcgagagagagaaggcgcaacgagagtaatggaggtgtttttagtttggagggcacttgtatggctggcgctgatcactccagcagcggcgctggcgcagcaggaggaggcgccgggatgccggcggcggtgcggcaacgtgaccgtcccctaccccttcggcatcggctccgagcgctgctaccgcggcggcgtgcgggggtttcgcctcgactgcgacgacgcccgacgcccgccgcgcctcacagttgccggctacggccacgaggtgacctccatctccctcgccgccgccgaggtcaccgtgctgctcaacgccagccgcgcgtgctacggcggcggcgactacgggcgcggccgccgggggcgggaggagcagcccatgtccctcaacggcagcgcgttcctcttctcgtccatgaagagcaagttcgtcgccatcggctgccccggcctcgcctacttcgtcgacgacggcggggactacgtcaccggctgcatagcaacatcccgctcgggctcgcctcctaccggccgcgcctccgcagcttcggccgccgccagggcggcgccttccttgccaacgccaccgcctgcgcctacgctttcatggtggacgcatggtggttctggtacgccggctcaaacttcaaccggacgggcgacttcgccgtgcccgtcgtgctggactgggccatccggccggacgccgggagcgggagcgggagcgggagctgcgccgccgcaagccgcacgccgctgccgtcgtacgcctgccggagcgcgcacagcgtctgcatcgactccagcaacggccctgggtatatctgcaactgcaccgccgggtaccacggcaacccgtacgtcgtcggcgactgcacagacatcaacgagtgcgagcacaaagatgagtacccctgctacggcgtctgcaccaatacggcaggcagctacgcttgctcttgccccaagggatccagtggaaatgccagcgtggagggtggctgccgccgcgacgacaagttcactctagcactcaagacggtcacaggaaatatcaccttctacactagtcgtaataatttgagtttggagaaagcagtgacagataagccagcagcttag

SEQ ID NO: 240 - protein, 394 aa, Oryza sativa
MDRFAMPCQVSVDLVHRHSPIGVAMLLADRSVMAIQQPRALNYEGSRNHTQREREGATRVMEVFLVWRALVWLALITPAAALAQQEEAPGCRRRCGNVTVPYPFGIGSERCYRGGVRGFRLDCDDARRPPRLTVAGYGHEVTSISLAAAEVTVLLNASRACYGGGDYGRGRRGREEQPMSLNGSAFLFSSMKSKFVAIGCPGLAYFVDDGGDYVTGCIATSRSGSPPTGRASAASAAARAAPSLPTPPPAPTLSWWTHGGSGTPAQTSTGRATSPCPSCWTGPSGRTPGAGAGAGAAPPQAARRCRRTPAGARTASASTPATALGISATAPPGTTATRTSSATAQTSTSASTKMSTPATASAPIRQAATLALAPRDPVEMPAWRVAAAATTSSL

SEQ ID NO: 241 - DNA, 2040 bp, Oryza sativa
atggaagttccagaaagtaagcttggggatttcatccaaggcgatgacagggcaaagtggatagcggacagcaatcacaatatcacaaaattcacagaagatgagattaagagaattactgacaactatagtactgttattggaaaaggtggatttggacaagtttacaaaggagttcttgatgataaccgtgtagtcgcagtgaagagatacatatttgaggattccatggaagacttagctaaagaagtaatcgcccacagccaagtcaaccataaaaatgtggttaggcttgtaggttatagcatagagcaaaataatgctctaatggtggtcacagagtatgtatccaaagggagcctgcatgacatccttcatcaaagtgatactcccatatctttggacacaagattgtgtattgctatacagtgtgcagaagcattaggctatatgcattcttcaatgtatacccctattgttcatggggatatcaagccttcaaatatactactggatgacaatcttgatgcaaaaatatcagattttggaatatcaaggtttctctacggaggtaaaactcggcacactaaaaatgtaaaagggagcatagattacatggatcctatactatttagagacgggacacaatcgtcgaagaacgatgtttatagttttggagcagttctactagaattaattactagaaagaggataaaagaggaaggaaaagttagcctcattacaagtttcaccgaacatgattcagaaggaaaacggatgaaggatctttttgatgcaaatatagcatccgtcagtaacatgaagattatcaatcaaataggaaaattagcaacaaagtgcctagcaatggacatgaagaaacgtccaaagatgaacattgtggctgaacaccttcggaagcttagagaatatcgcaatggaggacatgataatacaaccctttggcgatccttctcggtaacacaagatttgtttgaaaaatacaagcaaagcacaaggaatgccagctatggttcgaccaagcaccctaagaagaagaagaagaagagtttcgccattttcaaacataatagtggcaattctaagttactggaaaagcttggtgctgtaagaattttcacaaagaaagaactaaagaaatttacaatggattattcctgtttacttcttaaagacggtttagcagagtaccacagaggaattctcgaggacaatacgttggtcacagtaaagacgccttatgatggagatgagagcctcaaaaattgttttctcatggaaatgatgatcttgtctcacatctcccacaagaacatggtcaaactgttgggctgttgcttggaggctaatattccaattttagtgcatgagtacactgctaaggggagtctctctgacattgtacatcatcagcctggatatttctcgctaccattacgcctgaagattgcatctgagacttcagaagcactggcacacatccattcttcaacagttggaggcatcgtacatggacctctcacaccttacgatgtactgttggatgaaaatttcatgccaatggtttcatgctttctttcctcgagaagcattaccaaggacaaggatcatatcgttcctgtattgaggatgactcgctgcaatgacccggtttacatgcaaaccgggattgcaaagaacgaaagtttcgtgtacagctttggtgtcattctgatggtactcatcagagggagaatgcctaaagatcacaactttgtttctgaattcatccaagcttatgaggcagaagatagtggagagagaatgttccatctgtccatcacaggagatcaagaggataggatggccatacttgaggagatgggaaggatggcagtgaggtgtgtgagcccggaagaagatggaaggccaacaatggcggaagtggcagaacgccttgagttgctcagaagtcagaacttcgattcggccgtagaagaccacgatgcacatacatatgcatggaggaagtcattatag

SEQ ID NO: 242 - protein, 679 aa, Oryza sativa
MEVPESKLGDFIQGDDRAKWIADSNHNITKFTEDEIKRITDNYSTVIGKGGFGQVYKGVLDDNRVVAVKRYIFEDSMEDLAKEVIAHSQVNHKNVVRLVGYSIEQNNALMVVTEYVSKGSLHDILHQSDTPISLDTRLCIAIQCAEALGYMHSSMYTPIVHGDIKPSNILLDDNLDAKISDFGISRFLYGGKTRHTKNVKGSIDYMDPILFRDGTQSSKNDVYSFGAVLLELITRKRIKEEGKVSLITSFTEHDSEGKRMKDLFDANIASVSNMKIINQIGKLATKCLAMDMKKRPKMNIVAEHLRKLREYRNGGHDNTTLWRSFSVTQDLFEKYKQSTRNASYGSTKHPKKKKKKSFAIFKHNSGNSKLLEKLGAVRIFTKKELKKFTMDYSCLLLKDGLAEYHRGILEDNTLVTVKTPYDGDESLKNCFLMEMMILSHISHKNMVKLLGCCLEANIPILVHEYTAKGSLSDIVHHQPGYFSLPLRLKIASETSEALAHIHSSTVGGIVHGPLTPYDVLLDENFMPMVSCFLSSRSITKDKDHIVPVLRMTRCNDPVYMQTGIAKNESFVYSFGVILMVLIRGRMPKDHNFVSEFIQAYEAEDSGERMFHLSITGDQEDRMAILEEMGRMAVRCVSPEEDGRPTMAEVAERLELLRSQNFDSAVEDHDAHTYAWRKSL

SEQ ID NO: 243 - DNA, 2284 bp, Oryza sativa
agaggggagccggacgacggctgtggtcaccgacgacgagtgcgcggcgaggggaggaccgctccggcgagcggcgacgaggggaggacacgcgcatgcgcgcgctcgacgccagcaagcggcaagcggcgggcgtgtctgtccatcttccccatcgtccatcgtcgtcccggtcgcccgcccgcctcgcccccgcgaccaccgctggcgaccacagccgccagtcagttcatcaacatcttcaaatagtagtttttttttaagataacagtgagatttttattgttggcaaacaatggaacttctacaagagaagaacatacatgtcagccaaagggatgacaaggcaaagtggataattgataactatagtaatattaggagtttcacagaacatgacattgagaaaatcactagcaactatagcactctaattggaaagggtggatttggagaagtatttagaggggttcttgatgatgaagatgacgtagttgccgtgaagagatatatccgtggagatttaagagaagagttcatggaagagataagaatccatgctcaaatgagccataagaatatagtgaaacttataggctgctgtataggaaaaaatagactgatgatggtaactgagtttatctcaaatgggaatcttgaagatgcacttcacaacagtgatattttcatccctttgagtacacgcttgggcattgcaatgggatgtgcaaaagcattgagctacatgcattcgatgcatttatcaagtagcagccttatatgtcatggcgatattaagcctgcaaacattcttcttgatgccaatcttacagcaaaagtttcagattttggaatctcaaagtctctctcaggaggcatcacccgatggacttctaatgttaaaggaagtatagcttacatggatcctatatattatagagaaggccgtgttacctcgaagagtgatgtctatagctttggagctgttctgttagaacttatagctcgaaaaagcatgaaagaagggggcataagttgcgaagctttccgtcaagcttgtgcaaagggaaaaggactgagggaactgttggatatagaaatagcagaagaatgcaatatgaatattcttgaagaaattgcaaaattggcaactaagtgcatgatagtcgacaatattaaaaaacgtcctcaaatgaatgatgtggctgaacaccttcggacttggatttttcaagtccggaatggtggacatgaaaaaccagcttgggaatccactttggataaagtacatgatgcattgaagaaaggtacatcatcaaacttttgggtcattgttccgatgctgatcatcttcctattctcatatatgagtatgctgctaaagggagcctcaatgacattctgtactctaaagaagatttcccactagagttacgtctgaagattgcagtaaaaactgcagaagcattagaattccttcactcctcagcattttgtgtcatccgacatggtaatatcaagccaagcaatatacttcttgacagtaacttaatgccaaaggttgcaggttttacttcatcaaggaggattgctgaaaacaacaatgatcaggtcgcgtctatggaattcacgcatatacactacatggacccgattcatattcagtctgggcatttcacggtaaaaaacgatgtgtacagcttcggtgtcgttctctttgaactcatcagcaggaagaaacctgtatatcattgtcatgacaacaatcgtcgactcatccctgaattcatcagagcttacgagacagccaagagtgggaaggcaatgtttgatgaagggatcatggctgaagaagatatcgctgtccttgaagagattgggaggctggcaatggagtgcgtcagcttggaaatcgacggaaggccgacgatgaaggaagtggctgaacgccttaagatgatcaggagaatgaaggagagctcagccatgggagcagcgagatgctaactgaagcagaagctatagaaggctgttggcatcgctgaaaccgaagatgaagccaactgatgggccacaactgattgttccctttcagtctttcacctgagagatcgtttacagagtatcatcagaaacatagtgtgtactgtttggttgttaactgtgttatataacatactgtattctctattggcagtttgtcaccatatatataagactatatggactatttttggttgttggttttgtaagccgttgtcgtattgttttgtctgttgtcatc

SEQ ID NO: 244 - protein, 377 aa, Oryza sativa
MELLQEKNIHVSQRDDKAKWIIDNYSNIRSFTEHDIEKITSNYSTLIGKGGFGEVFRGVLDDEDDVVAVKRYIRGDLREEFMEEIRIHAQMSHKNIVKLIGCCIGKNRLMMVTEFISNGNLEDALHNSDIFIPLSTRLGIAMGCAKALSYMHSMHLSSSSLICHGDIKPANILLDANLTAKVSDFGISKSLSGGITRWTSNVKGSIAYMDPIYYREGRVTSKSDVYSFGAVLLELIARKSMKEGGISCEAFRQACAKGKGLRELLDIEIAEECNMNILEEIAKLATKCMIVDNIKKRPQMNDVAEHLRTWIFQVRNGGHEKPAWESTLDKVHDALKKGTSSNFWVIVPMLIIFLFSYMSMLLKGASMTFCTLKKISH

SEQ ID NO: 245 - DNA, 678 bp, Oryza sativa
atggaacttcctgaagacacgattatgacaggagatcatagtcaatgggatgataatagtaatattaggagttttacaaaacatgatattgagagaattacgggcaactatagcattcccattggaaaaggcgggttcggagaagtctttaaaggattcattgatgattatgaccgtgatgtagttgcggtgaagagatatatccataccgatttgagaaaggagttcatggaagaagtaagcattcatagtaaaatcaaccataagaatgtagtgaagttcataggttatagtacaggggaaaacaccctaatgttggtaactgagtttatctccaatgggaaccttgaagatgcacttcacaagagtgatatttccatctctttggatacaagattgggcattgctatcgggtgcgcagaagcattgagctacatgcattcgatgcacttatcagttgatcttgacagccttgtatatcatggtgatattaagccagcaaacatacttctaaatgatagtcttacagcaaaagtatctaattttggactgtcaaggcatctctctggaggcattactcgatgtacaaatactgtaaaagtatggattacatggatcctatatatcttcacactgggcggattacctgaaagagtgatgtctatagttttgggatag

SEQ ID NO: 246 - protein, 225 aa, Oryza sativa
MELPEDTIMTGDHSQWDDNSNIRSFTKHDIERITGNYSIPIGKGGFGEVFKGFIDDYDRDVVAVKRYIHTDLRKEFMEEVSIHSKINHKNVVKFIGYSTGENTLMLVTEFISNGNLEDALHKSDISISLDTRLGIAIGCAEALSYMHSMHLSVDLDSLVYHGDIKPANILLNDSLTAKVSNFGLSRHLSGGITRCTNTVKVWITWILYIFTLGGLPERVMSIVLG

SEQ ID NO: 247 - DNA, 1986 bp, Oryza sativa
atgaggaaagtccacgataataataatgttcggatattcacagaagatgaaataaaaagaattacaaaaaactatagaactctcattggaaaaggtggatttggagaagtctttagcggtgaccttgatgatgatgatggtcaagttgcggtaaagagatatatccgtggggatttaagagaagagttcatggaagaggttagaatccatgcccaaatgagccataagaatatagtgaaacttataggctattgtattggagaaaacactctaatgatggtaactgagtttatcttgaatggtagccttgaagatgtactttgcaacagggaaatttccatccctttgaatacacgcttgggcattgctgtagggtgtgcagaagcattgagctacatgcatttatcaagtgacagccttgtatatcatggtgatattaagcctggaaacattcttctagatgccaatcttactgccaaagtttccgattttggcatctcaaaatctctttctggaggcctcactcgatatactttacatattatggggtgtgaagattacgtggaccctttatatgtcagagatggccgtcttaccccaaagagtgatgtttatagctttgggatagttcttttggaactcatagctcgaaaaagagtaaaacaggacggcgttaacttaattatatcctttggtcaagcttgtgcaaacggaaaagggctgagggaactgttcgatgcagaaatagtagaggagtgcaatatgaatgttcttgaagaaatagcaaaattggcaattgaatgtctgacattggacattgaagaacgccctaaaattaatgatgtggctcaacgccttcggacccttcaaactcatagggaggggcaggaaagtgcagctcggaaatcttcttcctcacgaatgctgaacgcattaaggaaagggtacaagcaaagcacaagcattttcagctctactcctacggccaaccataggcggaatgccatttcggaaataaaatctgagatggctaaacaacacaattttagaagtttcacaaaggagaatctatttgaagtcatggggcgttacaaatctcctcttggtgacaaagggtctggcattggtaggtacaataaaggaacactagaggacaatatgttggtggtagtgaaaagtcacctttcagatgaggatgtcttcatgattttttatgaagcatccattgtgtcccagatcgttcacgagggcatcataaaacttttggggtattgctttgatgctgattttcccatgctagtatatgagtatgttgatcgagggagtctatacgacattctgaatagtgcacaagatatcccactagggttacgcctgaagatcacggtaaagactgcagaagcattagatcaccttcactcgtcaccattctgtgtgagacacggtgatgtcaggtcgaccaacatactcttagacaaaaacctaatgccaaaaatctcaggttttacatcatcaagaaggcttaccaagggcaatttgtcttttgataacgttgaaaagtactgtgatcttatgccaaaaaaaataataagggatgatccgagctacatcgacccaaaatttctacagtctgatgtcctgacaactgaaagcgatgtctacggttttggtattattttgctagaactcattagcaggaagaaacttttataccaggacaagaaacactgcccggttcgcctcatccctgaattcatcaaagcttataaaacagaaggtagtgggaatgcaatgtttgataaaggaattacagccaaaaaagatatcgtggttcttgaaaacatcgggaggttggcactgaggtgccttagcatggaaataaggccgacaatgaaggatgtggctgaacaacttgggatgatccgaagggcttggaaacagcatgcaccacaggggcatggatgcacaggctgttggcatctatga

SEQ ID NO: 248 - protein, 661 aa, Oryza sativa
MRKVHDNNNVRIFTEDEIKRITKNYRTLIGKGGFGEVFSGDLDDDDGQVAVKRYIRGDLREEFMEEVRIHAQMSHKNIVKLIGYCIGENTLMMVTEFILNGSLEDVLCNREISIPLNTRLGIAVGCAEALSYMHLSSDSLVYHGDIKPGNILLDANLTAKVSDFGISKSLSGGLTRYTLHIMGCEDYVDPLYVRDGRLTPKSDVYSFGIVLLELIARKRVKQDGVNLIISFGQACANGKGLRELFDAEIVEECNMNVLEEIAKLAIECLTLDIEERPKINDVAQRLRTLQTHREGQESAARKSSSSRMLNALRKGYKQSTSIFSSTPTANHRRNAISEIKSEMAKQHNFRSFTKENLFEVMGRYKSPLGDKGSGIGRYNKGTLEDNMLVVVKSHLSDEDVFMIFYEASIVSQIVHEGIIKLLGYCFDADFPMLVYEYVDRGSLYDILNSAQDIPLGLRLKITVKTAEALDHLHSSPFCVRHGDVRSTNILLDKNLMPKISGFTSSRRLTKGNLSFDNVEKYCDLMPKKIIRDDPSYIDPKFLQSDVLTTESDVYGFGIILLELISRKKLLYQDKKHCPVRLIPEFIKAYKTEGSGNAMFDKGITAKKDIVVLENIGRLALRCLSMEIRPTMKDVAEQLGMIRRAWKQHAPQGHGCTGCWHL

SEQ ID NO: 249 - DNA, 1656 bp, Oryza sativa
atgccgtatccttttggcaccatagatggctgcttccggggaccacccttccgcgtctactgcgaagacgaccatgcggtttatctccaggagcacaagaagttgaaggtcttgcgattcgagctggcccagggcgaggttctcatccagaagcgcatagcaacaagctgcggcgtcaacctcaccggtaaagccgtcggcattccatgggtagtgcacgatggtggcttagcagatgactatccctatctgacaatctctaccaagaaccagtttgcagtagtcgggtgtggtatcacagcgatcatcgttggtcagggagagaaccagcctgattacacggtcggatgccgatcattctgtgatgatgtcgatagcaatattgtcgaagataatagcacgcaatgcaatggcaacacgggctgctgccaggcttccatcccaggtaatctcaaggctttccagccctcattcttaaaaataagcggtgtgaactactccggcgtcccgtgtgtctacgctttcgtcgtggagcagaactggttcaaattcaagacctcatatgccaaatcgatggaactttattcaaagtatcgaaataagggcaccggggttcctctagtgctcgacttggttgttggtaacgaaacgtgtgacgaagccaaaaggaacgcattatcctatgcgtgcaaggctacgaacagctcttgcatcgacagacctagccgctcagggtacctttgcaactgctctcaaggttatgaaggaaatccctacctacatggaggctgccaagacatcaatgagtgcgattatccatggttgtatccttgcaaaggtttaagcattggtataggagttggtagcgcaacaggctttatttgcattgttctcattgcaatgttccttaccagacggataaagcacaggaggaaaataaagctaagacaaaagttcttcattctgaatcgtggacaactgcttaaacaattggtatcccaaagggcagatattgctgaaagaatgatcatcacattagatgagcttgaaaaggcaactaacaactttgacaaagctcgtgagcttggaggtggagggcatggcactgtttataaagggattctatcagacctacatgtggtagccatcaagatatcaaatatagtggtcccgaaagaaatagatgatttcataaatgaggttgccatcctctcacaaatcaaccataaaaatgtagtaaaactaattggctgttgtctagagactgaagttccattgttagtttatgaatttatttccaatggaaccctgtatcaccatcttcatggtgagggtccaaggtcgctatcatggagcaataggttgaggatcgcagccgaaattgcaaatgctctttcctatcttcactcatcagttacaatcccaataatccatagagatataaagtccagtaacatacttcttgatgataatctgacatcaaaggtatcggactttggagcttcaaggtatatcccaatcgagaaaacagcactaacaacagcagttcaaggtactgtaggatatttggatcctatgtacttttacacgggtcgtctcaatgataaaagtgatgtctatagctttggtgttatgctagtggaattgctcacctag

SEQ ID NO: 250 - protein, 551 aa, Oryza sativa
MPYPFGTIDGCFRGPPFRVYCEDDHAVYLQEHKKLKVLRFELAQGEVLIQKRIATSCGVNLTGKAVGIPWVVHDGGLADDYPYLTISTKNQFAVVGCGITAIIVGQGENQPDYTVGCRSFCDDVDSNIVEDNSTQCNGNTGCCQASIPGNLKAFQPSFLKISGVNYSGVPCVYAFVVEQNWFKFKTSYAKSMELYSKYRNKGTGVPLVLDLVVGNETCDEAKRNALSYACKATNSSCIDRPSRSGYLCNCSQGYEGNPYLHGGCQDINECDYPWLYPCKGLSIGIGVGSATGFICIVLIAMFLTRRIKHRRKIKLRQKFFILNRGQLLKQLVSQRADIAERMIITLDELEKATNNFDKARELGGGGHGTVYKGILSDLHVVAIKISNIVVPKEIDDFINEVAILSQINHKNVVKLIGCCLETEVPLLVYEFISNGTLYHHLHGEGPRSLSWSNRLRIAAEIANALSYLHSSVTIPIIHRDIKSSNILLDDNLTSKVSDFGASRYIPIEKTALTTAVQGTVGYLDPMYFYTGRLNDKSDVYSFGVMLVELLT

SEQ ID NO: 251 - DNA, 2214 bp, Oryza sativa
atggcaacaaataagcgagtagtggagctggagcgctgcatgttgattggcgtctgtctgcttctgctatgcctcctgcacaccgctgaggcgcagttgatgcagcatccgccggcggattgcccagaaacgtgcggcaatatagctatcccctacccatttggcattggcaacaattgttccttgctagggccggcaggcgacgacttcaccgtcgtatgcaatgatagctacaacccaccaaggcccttcaggggtgactatgagatcaccggtatcgtgctggaggaaggcgtgttgaacgccagctacacagccgtgccgtatatctgctatagctcgcccaacacctcccaacaattcaccatgtcattcgacctcgccggctcgcctttcctcatctcgacgacaggcaacaagttcacggccatcggctgcaacaccctggcgatgattataggcaaggaagatatgacctactttaccggctgcatctcctactgcggtggggatgtacaaaaggccgcacccgatggctcgccgtgcagtggcctcggctgctgccagactgaactcacgccggagctcagcttcttgaacgtcacctggggagtcgatggccacaacgacactacaaatagtgcgtgggattacagcccctgcagctacgccttcatagccgataaaaactggtactccttcaagcgggaggacctcgttggcaatgccaactactttgacaaaaaaggcattcctttggtgctggactgggctatcaggagtaacgggtcttcatgcccgcacgagtctggcaagatggcaaacccggttgtgccttacggtgcttgcgtgagcagccacagctactgcgtcaacgtcaccaacaacggacacgggtacctctgtaattgctccgatggatatcatggcaatccttatctccccgaaggatgcatagatattaatgagtgtgatccatccacttataaagagaatccttgccctggtgggacatgccataacctagaaggtggctacaaatgtaaatgcaactttgggcgaagaaaagatagaaaaaacaacaattcctgtcaaccagtactatccaaatcagctacagcgctgatcgcaacaatatgtgccatcgcaatttcgtccatcgtactcattttcttgcgcatggaatatgagaagaggaagcttagagatcatttcaacaaaaatggtggtcaacttctcaaaaacataggtattaagatattcacaaaggaggaggtaggcaaaatcacaaacaattatagtatcattcttggaaagggtggcttcggtgaggtgtacaagggaactactaatgacaaccagcaagttgcggtgaagcgctccattgcagttgatgatgaggcacgcaaaaaggattttgctaatgaggttacaattcaatctcaaatcaatcataagaacgtggttagacttgtgggttgttgtttggagacaaatgtcccaatgctggtctccgcgtacataccaaaaggaagcctgcacgatgtgcttcatggtaatggcaatcacgttgcaaaatataatctcacattacaagtacgtctagaaattgctattgaatctgcagaagctctagcttacatgcattcatctgctagtcagaagatacttcatggagatgtcaagtccagcaacattctcctagatgatgacttcaagccaaaagtctcagactttggaatatctagactcatatctatagagaagaaccacactaacttcgtcgtaggggatataaactacatagatcctgtgtatatgaaaacagggatacttacagagaagagtgacgtgtatagctttggggttgtgctcttagaactaatcacaagaaaaaaggcaaggtatgatggaaacaatagcctcccaataaactttgttaaatcttacatgacggatagccaggcaagagagatgctcgatgatgatatcacgtcacctgaagtcatggactgtcttcacatgattggtaggatcgcagttcaatctttgaaggaagacgtggatgagaggcctaccatgaagcatgttttggagcaccttcatttggccaggtcgatgataccaaaatctacgagtgggcaacagtccggaagaatactgatagctagtggaatcaatcaagcaatagtcaggttcctcacaagctgctaa

SEQ ID NO: 252 - protein, 737 aa, Oryza sativa
MATNKRVVELERCMLIGVCLLLLCLLHTAEAQLMQHPPADCPETCGNIAIPYPFGIGNNCSLLGPAGDDFTVVCNDSYNPPRPFRGDYEITGIVLEEGVLNASYTAVPYICYSSPNTSQQFTMSFDLAGSPFLISTTGNKFTAIGCNTLAMIIGKEDMTYFTGCISYCGGDVQKAAPDGSPCSGLGCCQTELTPELSFLNVTWGVDGHNDTTNSAWDYSPCSYAFIADKNWYSFKREDLVGNANYFDKKGIPLVLDWAIRSNGSSCPHESGKMANPVVPYGACVSSHSYCVNVTNNGHGYLCNCSDGYHGNPYLPEGCIDINECDPSTYKENPCPGGTCHNLEGGYKCKCNFGRRKDRKNNNSCQPVLSKSATALIATICAIAISSIVLIFLRMEYEKRKLRDHFNKNGGQLLKNIGIKIFTKEEVGKITNNYSIILGKGGFGEVYKGTTNDNQQVAVKRSIAVDDEARKKDFANEVTIQSQINHKNVVRLVGCCLETNVPMLVSAYIPKGSLHDVLHGNGNHVAKYNLTLQVRLEIAIESAEALAYMHSSASQKILHGDVKSSNILLDDDFKPKVSDFGISRLISIEKNHTNFVVGDINYIDPVYMKTGILTEKSDVYSFGVVLLELITRKKARYDGNNSLPINFVKSYMTDSQAREMLDDDITSPEVMDCLHMIGRIAVQSLKEDVDERPTMKHVLEHLHLARSMIPKSTSGQQSGRILIASGINQAIVRFLTSC

SEQ ID NO: 253 - DNA, 2085 bp, Oryza sativa
atggcggtgaagaaacacaacgtcgccatgcaattacaagtggtagtactgtggcttgtaggagtagcattattttctgtgatggcgtcgtccgctccggcggccgtagcggcagcaccgccgcccgcggagtgcccgagcaagtgcggcgacgtcgacatccccttccccttcggcgtcggcgacgactgcgcatggccgggtccagatgacttcaacgtcacatgcaaccatagctttacccctcccagaccctactacagcaacatggagatgaaggacatctcgctgccgaagggggagatgcgcgtctacacttccgtgctgcaaaactgcttcgacttgtccaacaccagcagcagctccgagtccgacgtaggctcgccatggctcgacctcgccgggacgccgttccttgtgtcgccggagaggaatgagttcacggccaccgggtgcgacacgctggggatgatgtacggcagggaggacgggagctacttgaccggctgcgtcacgacgtgcgcgagcttggatgccgccgccaacgacggtgaccactgcgcggggctgggttgctgccagatccagtccatccctacaaaccttaccttgctaaggattgtgctgtcggccaacatcaccgacaggaagattgctgcgtggaacccatgccgctacgcctttataaccgaccgagacgggcaattcaggtacaattttagccggaaggatttgggtcgctcaggcaacaagatatttgcaaaccgggacggcgagatggtcgtccctacggagcttgactgggccatcaggggaacaaataggtcatgctctgtctgcgtcagcgaccaaagcgactgcgccaatgccactaacggagacgggtatctctgcaagtgctccgagggatacgacggcaatccctatctcaaaggcaatggcggatgcacagatattgacgaatgcaaggaaccagatcgttgttctactggcagcagatgccataacacagagggttattattattgcaaatgccgttttccacgtagaggggatggcaaagttaatggcaaaggatgccaccttcccaaatatatagtcccgacgcttgcgacggtgtgctctgtgatttctcttacggtccttgtgtgcttgtataagagacggaagagaagaatgtttgccaacaacaatggtggccggctgctcaaggatatgaacatcgtcctcattacggagaaagacctaaacaagatgacaaagaataggagcaccaagatcctcggagagggttccttcggcaaggtctacatggaaacccacaagaaccagccggttgccgtgaagtactccaagggaaagcgcaagctggcacagacgacgcatggcaaagacatcaagtgcatgaacaagaacatgttccaaaacgccttttgttggtccaaagttccatcctcgccggaagaagattcgtcgtcacgagtgtccggcccggagttagtggacgagctaagggtccagtcactaatccagcacgaaaacgtgcgccttgacatcgccatcggctctgcgaaggctctttcctacatgcactcctctagccttatgcatggagatgtcaagccagccaacatcctccttgatgacaacctgaaccctaaggtctctgactttgggtcatctgagctcatattgaaattcaagcacgtgtgtgttgacaagaactatgtcgatcctgtgtgcatactgacgaacaagtatactatggagagcgatgtctacagctatggggtcgtgctcctggagctcatcacccggaaaagggccaagtacgacgatgaaagaagcatccgagtagaatttgtgaaccagtacaaagacaacaacgaaaggaggaagatgtatgaccaagacatgttgtcgtctacggattccctatatccttactgcatggagtgccttgacaggatggcggccgtcgcggtccggtgtctgaaaaacaaggtggacaagagaccgaccatggcggaggtcgtcgaggagcttaagcagctgagagagcaaataagcacgcgtatgtcctag

SEQ ID NO: 254 - protein, 694 aa, Oryza sativa
MAVKKHNVAMQLQVVVLWLVGVALFSVMASSAPAAVAAAPPPAECPSKCGDVDIPFPFGVGDDCAWPGPDDFNVTCNHSFTPPRPYYSNMEMKDISLPKGEMRVYTSVLQNCFDLSNTSSSSESDVGSPWLDLAGTPFLVSPERNEFTATGCDTLGMMYGREDGSYLTGCVTTCASLDAAANDGDHCAGLGCCQIQSIPTNLTLLRIVLSANITDRKIAAWNPCRYAFITDRDGQFRYNFSRKDLGRSGNKIFANRDGEMVVPTELDWAIRGTNRSCSVCVSDQSDCANATNGDGYLCKCSEGYDGNPYLKGNGGCTDIDECKEPDRCSTGSRCHNTEGYYYCKCRFPRRGDGKVNGKGCHLPKYIVPTLATVCSVISLTVLVCLYKRRKRRMFANNNGGRLLKDMNIVLITEKDLNKMTKNRSTKILGEGSFGKVYMETHKNQPVAVKYSKGKRKLAQTTHGKDIKCMNKNMFQNAFCWSKVPSSPEEDSSSRVSGPELVDELRVQSLIQHENVRLDIAIGSAKALSYMHSSSLMHGDVKPANILLDDNLNPKVSDFGSSELILKFKHVCVDKNYVDPVCILTNKYTMESDVYSYGVVLLELITRKRAKYDDERSIRVEFVNQYKDNNERRKMYDQDMLSSTDSLYPYCMECLDRMAAVAVRCLKNKVDKRPTMAEVVEELKQLREQISTRMS

SEQ ID NO: 255 - DNA, 2436 bp, Oryza sativa
agtatgtgcagatctgctataagcttaagctcagcttaattagccacggtacgtagtttgtacagaaatggcggtgaagaaacacaacgtcgccatgcaattacaagtggtagtactgtggcttgtaggagtagcattattttctgtgatggcgtcgtccgctccggcggccgtagcggcagcaccgccgcccgcggagtgcccgagcaagtgcggcgacgtcgacatccccttccccttcggcgtcggcgacgactgcgcatggccgggtccagatgacttcaacgtcacatgcaaccatagcttcagcccacccagaccctactacggcaacatagagatcagggacatctcggtggcggcgggggagatgcgtgtgtacactcccgtggtctaccagtgctacaacacatccgaccacgtcgactcttcaaccagcttcctgcagctcaacatcaccgactcgccgttcctggtcgctccggggagaaacgagttcacggccatcggctgcgacacgttggcgtggctgcagggcagggatgactggagcttcttgaccggctgcatcacgacgtgcgtgagcttagacgaggctgcccacgacggcgagcagtgctccgggctgggttgctgccaggtgccttccattccgcccaaccttgccctcgtagagctgaattgggggaacttaacaaaaaactatgcatggagatacagcccatgcagctacgccttcgtggctgagaaagcatggtacaaattcagccgtggagattttagccgtgccggtagcaagagctttatgaatcgtgctggagacagaagtgtcgttacagtgcttgattgggctatcaggagcgacggatcgtgctcgtcaacatcgcgggtcgctcctgcctgtgtcagccccaacagctactgcgtcaacaccaccaacggacagggatatctttgcaagtgctccccgggatatgatggcaatccctacgtcaccggtgacagtgggtgtacaaatattaatgaatgcaagcttagaagagaagaccctgccaagtacagtgaactttatccatgttacggtggtagcaaatgccatgacacagagggtgattacaggtgcaaatgccgtttgggacgtagaggggacggcaaaatcgataatggatgtcaacccataattcccccacctgtaattgggattcttgtgatagccggtgttgtgctatttggtttggtccttgtgtgcttacgtaagaaatggaagcttaaagggtgctatgaccgtaatggtggccaaatgctagagaagacgagcgttaaaatctttacaaagcaggaattggacaagataactaacaacaaaagcaacaagatagggaaaggcgccttcggtgtggtctacaagggaacccacgacgatcagccggtcgccgtcaagtactccatcgaaaagagcatatcgcggactcgtggcaaggatgagttcgtgaaggaaatcacggtgcaacttcaagtcagccacgacaacctggtgtgcctcattggttgttgcctcgaggtggaggtccctatgctggtcttcgagttcgtccctaatggtagcctcgagagcgtccttcatggggcagagcggtgcgctctcccgctgctgaaacggctggatattgccattggctctgcgaaagctcttacctacatgcactcgcattcccgccgctgcatttttcatggtgatatcaaacctgccaatattctccttgacgacaaccttatgcctaaagtctccgactttgggtcatcagagtccgtattgaaaaccaagcaccgaagcgtgtgtgccgacatgggctacatagatcctgtgtatatggtaacaggcaattttagactgaagagtgatgtctacagtttcggtatcgtggtcttagagctcatcacccgaaagaaggccgtgtacgatgggaaaagccttccgatagaatttaccaactgttacgaggatgataatgccagaaggaatatgtacgaccaggacatattgtctgcagaggctctacaacctcactgcatggagtgcctcgacagaatggccggcattgctgtccagtgccttgaatacaacatagacaagaggccgactatggcggaggcgctacaggagcttatccaattgagagcaaaggttgcaggaaaatgaatgcaaggtccgatgttcagacaacccgtatgttgatagtttcgctttgtatcgtcgttaatttattatcatatcccccagcaaatgtcgacgttggtttgagttgaccaacgggtcattttaatttatctttttggcggggaagtgtcgttttaattagtatgtgtaccatttaccaacaaagtggcaattaaaagcaaaaataaattaagcagcatagtaagaaagttttcatc

SEQ ID NO: 256 - protein, 710 aa, Oryza sativa
MAVKKHNVAMQLQVVVLWLVGVALFSVMASSAPAAVAAAPPPAECPSKCGDVDIPFPFGVGDDCAWPGPDDFNVTCNHSFSPPRPYYGNIEIRDISVAAGEMRVYTPVVYQCYNTSDHVDSSTSFLQLNITDSPFLVAPGRNEFTAIGCDTLAWLQGRDDWSFLTGCITTCVSLDEAAHDGEQCSGLGCCQVPSIPPNLALVELNWGNLTKNYAWRYSPCSYAFVAEKAWYKFSRGDFSRAGSKSFMNRAGDRSVVTVLDWAIRSDGSCSSTSRVAPACVSPNSYCVNTTNGQGYLCKCSPGYDGNPYVTGDSGCTNINECKLRREDPAKYSELYPCYGGSKCHDTEGDYRCKCRLGRRGDGKIDNGCQPIIPPPVIGILVIAGVVLFGLVLVCLRKKWKLKGCYDRNGGQMLEKTSVKIFTKQELDKITNNKSNKIGKGAFGVVYKGTHDDQPVAVKYSIEKSISRTRGKDEFVKEITVQLQVSHDNLVCLIGCCLEVEVPMLVFEFVPNGSLESVLHGAERCALPLLKRLDIAIGSAKALTYMHSHSRRCIFHGDIKPANILLDDNLMPKVSDFGSSESVLKTKHRSVCADMGYIDPVYMVTGNFRLKSDVYSFGIVVLELITRKKAVYDGKSLPIEFTNCYEDDNARRNMYDQDILSAEALQPHCMECLDRMAGIAVQCLEYNIDKRPTMAEALQELIQLRAKVAGK

SEQ ID NO: 257 - DNA, 1559 bp, Oryza sativa
gactcttgactcttaacacacttgtaagataaggtcaacgtatcgtagcaacctttcatggcgggcaacaacttgcaagcaagcacgccatcgatgatcgatctatacttagtgaacagaacaggaagacgatcactcatctaataccgaattattagctggagagatcgattcaaggctattgtctggatcgaatgatttgtccatggagtgtagcggcggcggcggtggcgctgctgcttctgtcgccgggggagaatcagatggtccgagtgtcagcacagccgacgaagacgaggtgcgccgccggcgtcgtcgacacctgcggcgacgtgggcgtgccgtacctgttcggcatcgacggcggtagctgcagcttcctcccgggcttcaacctcacctgcgaccgcaccaagcagccacacaggctgttcctcggcgacggctcccacctccaggtcaccgagatctccctggccaactacacggtgcgcgtcctcaacggcgtcggcaccgtgaacttcacctttgcggggcacaacgattccacggcgaagtgggccggagtcagcgtcggccaagacgacgggccgtacatcgtctcagaggagcacaaccagctggtggtgacggggtgcaacatcatggcctccctgctcgggaacagcggcagcaacgtcatcatcggctgctcctccttctgctccatcaccgactggtggggcgccgacccaatagtgcactccggcgccggcggcgcgtgctccggcctcggctgctgcgacgtcaacatcaccatcggccggccctcctacgaactgcagctcaggtggctcgactgggaccacaactacgacgacctcctgcccatcgccgtgcgcatcgcggagcgcggttggttcgacggcatgtcgaccaagcttctcaggaaaaacagccgcagcgctgttcccgtgcccgtggtgctggagtgggccgtggcgtctgttcacaagccgcccactcccgtagacgtgaacagcacgtgccccaaggacccggcgagaagcgagtgccgtagcagcaacagcttctgccgcaacatcgccaacatgtaccgcagcggttacgtgtgcaagtgcgacgacgggtaccagggcaacccttacctcaccggcggctgccaagatatcgacgaatgttcgctgccgggcaagtgcttcggtgagtgtacaaacacgccaggaaactacagttgccgttgtccgcgtggtgcgcgtggcaatccctacaccaaagatggctgcatcaagtttcctctaggtccgggtctacagagaaaatggattggtgcgggttggatttgctttggtgtgagtccgaatggtcctttctctcgtcttcttggcatgttgatgagaaaccaacgtggtgggagggacggcatcacgttgaaccgcaacgctagtgatgctggcgccaagagaaatgtctatttgtaaaataagtttctctaagattctatttgtaaaaaagttttaaaaagatctaaaatatgaactgctctaattaacttgtcc

SEQ ID NO: 258 - protein, 428 aa, Oryza sativa
MICPWSVAAAAVALLLLSPGENQMVRVSAQPTKTRCAAGVVDTCGDVGVPYLFGIDGGSCSFLPGFNLTCDRTKQPHRLFLGDGSHLQVTEISLANYTVRVLNGVGTVNFTFAGHNDSTAKWAGVSVGQDDGPYIVSEEHNQLVVTGCNIMASLLGNSGSNVIIGCSSFCSITDWWGADPIVHSGAGGACSGLGCCDVNITIGRPSYELQLRWLDWDHNYDDLLPIAVRIAERGWFDGMSTKLLRKNSRSAVPVPVVLEWAVASVHKPPTPVDVNSTCPKDPARSECRSSNSFCRNIANMYRSGYVCKCDDGYQGNPYLTGGCQDIDECSLPGKCFGECTNTPGNYSCRCPRGARGNPYTKDGCIKFPLGPGLQRKWIGAGWICFGVSPNGPFSRLLGMLMRNQRGGRDGITLNRNASDAGAKRNVYL

SEQ ID NO: 259 - DNA, 951 bp, Oryza sativa
atgagaggattgcaggccgccgtgctgttcacggcggtggcggcggcggcggcgccgacgaactgcaccacccgctgcggcgacatcagcttcgagtacccgttcggcgtggagcccggctgctaccacccaggcttcaacctcacctgcagcagcaacgacaccaggctgttcatgggcgacggcaccgtgcaggtgctcgacatctccatccccaactccaccttgcgcgtcaacgccaccgccatggcgttcgaccccgccgacgacgtgcagcgcggcgtcatcaacgcgacgacgacatggcgcgccgccgccgccgccgacgacgacgggggcccgttcgtcgtgtcgaggcgcaacacgatcgcgctgatgggatgcaacgcccgcgtcgacctccgcggcggagaccgccgccacagcgacaacctggtcagctcctgcaccgccgtctgcccaccggtcggcggcggcgacgacgccgcggctcacgacgacggcgacggcggcgacggccacaccatcgcgatcatcgacgcctggaacggcaagtgctccggcgtcggctgctgccaggcaaacatcatgctgggctacccttcctacaccatccagatcaagcagctgcaggagaagaacctccatagcttcgacttccagtacatcgcctacatcacggacgagacgctgaatttcacggaagagatcgccggccgcatcgccactccggcggcgctcccggccacgctagactttgtgatcagaagcaactcgtcgtgttcgacgccggcgaactcgacggccggcggcgagtgccgcagcgaacacagcttttgtgaggattacaagggtggtggtaataccctccttgggtatagctgcgtctgctcggagggttaccgaggaaatccctacgttgctggtggatgccatgagcttaattgctaa

SEQ ID NO: 260 - protein, 316 aa, Oryza sativa
MRGLQAAVLFTAVAAAAAPTNCTTRCGDISFEYPFGVEPGCYHPGFNLTCSSNDTRLFMGDGTVQVLDISIPNSTLRVNATAMAFDPADDVQRGVINATTTWRAAAAADDDGGPFVVSRRNTIALMGCNARVDLRGGDRRHSDNLVSSCTAVCPPVGGGDDAAAHDDGDGGDGHTIAIIDAWNGKCSGVGCCQANIMLGYPSYTIQIKQLQEKNLHSFDFQYIAYITDETLNFTEEIAGRIATPAALPATLDFVIRSNSSCSTPANSTAGGECRSEHSFCEDYKGGGNTLLGYSCVCSEGYRGNPYVAGGCHELNC

SEQ ID NO: 261 - DNA, 2226 bp, Oryza sativa
atgcaagaagcattagtccttgcaatgaaggtcataccaagcatcatcttcctcgcagtggcagtgcaggatgcagcttcttctgggtacagtctgtcgttgccaggatgccctgataagtgcggaaatgtttccatcccctacccttttggcgtcggccccagctgtgctgcaaccagcatcagcagctacttcaatctcacctgcagcaacaccttcaacccaccacggcctatggttggggactctgaagcactcgtcgaggtcactgacatctcactggagcacggcgagatgcgggtgctcagccctgtctactacatctgcttcacggcaaataccacgttcaccaagttcaccgaagggtatgagctgaagcacacacccttcctcccctccccgtcgcgcaaccgcttcacagtcatcggttgcaacaccctggggctcatcggtggctacaagggaaccgtgagccactatgtgactggttgctactcctattgtgagagcatcaacagcacatctgatggggcgccatgtgcagggatgggctgctgcgaggccgccataccgactgacctcaccgcctggggggcgatgtttgagatgaaccagagcaaggtatggagcttcaacccgtgtttctatgccatggtcagtgaggttgggtggtacagcttccagcagaaggaccttgttggccaccttgggttcatagatgacagagctcagaggggagcacctgttgtggctgattgggccattaggaatggctcatgcccggaagaggggaaaggcatacctggtgattatgcgtgcatcagcgcaaacagctactgcatggacgcgaacaatggtccagggtacttatgccagtgctccaaagggtatgagggcaacccttatcttctgaacggctgccaagacgtggatgagtgcgcattgcgtaagcaagatcccaagtatgaggatatgtatccatgcagaaaaggaatctgccacaacacaccaggaggatacttatgcaaatgcaagttagggaaaagatctgatggtacaaattatggatgccggcctctgcgcactacagccgagaaagtggttattgtacaaaggaaaaggcataagaaggacaaagatgagtacttcaagcaaaatggaggtctaaagctatatgatgagatgagatcaaggaaggtagacacaatccgcatactcactgaaaaagatataaaaaaggccactgacaactacagtgaagatcgagttcttggaattggaggtcacggaatggtctacagaggaattttggatgacaacaaagaggtagccataaagaagtccaaagtaattaacgacgaatggagggaagaatttgtcaatgagataataatcttgtcacagatcaaccacagaaacattgtgaggttgataggatgttgcctggatgtacatgtccccatgttggtctatgagtttgtatccaatgggaccttgtctgagttcctccatggcactgatcgtagatcatcaatccccttggacattcgcctgaaaatagccacacaatcagcagaagctctagcatacctgcattcatcaacgtctcgcgcgatccttcatggagatttcaaatcggccaatattcttttggacgatcagcacaatgcaaaggttgcagattttggggcatcagcactgaagtccatgaacgaaagtgagttcatcatgtttgtccaaggaactttgggttaccttgacccggagagcttcattagccaccgtctaactgacaaaagcgacgtctacagttttggggtggttctgctggagctgatgacaagaaagagggcaatctatgccaatagcatcaatgaaaaggaatcattgtcctattcttttctcctgatgtttgatcagaacattcaccggaatatgctggacagagaaattatggataaagaaaccatggttgtgctcgagaaactttccattcttgccgccaactgcctgcgaccaagaggagatgaccggccaacaatgaaggaagttttagagtgcctacagatgataaggagacacccaatgcacggcgctagtgatcacaaaggagacagctatgcacatcacaactatgaaggatcgccatcaatggttgttcacttgaatgagaccatatacgagagcattgaaacgtccagattggttgatgatcttgtgagatga

SEQ ID NO: 262 - protein, 741 aa, Oryza sativa
MQEALVLAMKVIPSIIFLAVAVQDAASSGYSLSLPGCPDKCGNVSIPYPFGVGPSCAATSISSYFNLTCSNTFNPPRPMVGDSEALVEVTDISLEHGEMRVLSPVYYICFTANTTFTKFTEGYELKHTPFLPSPSRNRFTVIGCNTLGLIGGYKGTVSHYVTGCYSYCESINSTSDGAPCAGMGCCEAAIPTDLTAWGAMFEMNQSKVWSFNPCFYAMVSEVGWYSFQQKDLVGHLGFIDDRAQRGAPVVADWAIRNGSCPEEGKGIPGDYACISANSYCMDANNGPGYLCQCSKGYEGNPYLLNGCQDVDECALRKQDPKYEDMYPCRKGICHNTPGGYLCKCKLGKRSDGTNYGCRPLRTTAEKVVIVQRKRHKKDKDEYFKQNGGLKLYDEMRSRKVDTIRILTEKDIKKATDNYSEDRVLGIGGHGMVYRGILDDNKEVAIKKSKVINDEWREEFVNEIIILSQINHRNIVRLIGCCLDVHVPMLVYEFVSNGTLSEFLHGTDRRSSIPLDIRLKIATQSAEALAYLHSSTSRAILHGDFKSANILLDDQHNAKVADFGASALKSMNESEFIMFVQGTLGYLDPESFISHRLTDKSDVYSFGVVLLELMTRKRAIYANSINEKESLSYSFLLMFDQNIHRNMLDREIMDKETMVVLEKLSILAANCLRPRGDDRPTMKEVLECLQMIRRHPMHGASDHKGDSYAHHNYEGSPSMVVHLNETIYESIETSRLVDDLVR

SEQ ID NO: 263 - DNA, 4172 bp, Oryza sativa
atgggccttttgtttcttctcggcggcgcgtggctctcccggcgccggcgcgccgccgccggcggccactctcctcccgctcgccgcagctgctctcagatctcccccttactgggactcgctccgttgctgcctcctccccatccaaatcgtggagatctttcttcgggtatcaggatcttcctttgggaaatcgactggctcgcgacggcgacgcgatcggggtcgggtctccggtggctggctggtcgcggcccacggttggatggattgacggaggggaggaggggggaatcggtggttcagatcaagcaagcaagcgaagcaagtttctttcgggcaccggatgcgaactccggagttcagatcagatcaggtaaaaacctgcttcagatgtgtcaccacctttacatttcagggcctaatgctaatcaatcaataggatcgatatgcaagagaatgagataatctagatatttgaattagtagattacactggtagcatcatttccttttgccatagacgaaatggtttttaattggtcattcatacatgttatgttacctggacatgtggaatctgttgaaacaggcattcttggatatggtttgatactttgatggtgtagtttgatctgattaacagatagtgaaaaaaaatcaaaatgttctatttttaatagttcatcattatgactgaaaacatcacttcgcatagtacgtcatagttgatgagaattgatgtgcaattatacattctacatactacagctgtgttagccataagaaagaattaatatacataaagagtgaccttgcaacaccagaagaaacttattactctactcgatgaaaggaatatactgttctcatcttgcaatatctgcatccagtaccagcttggctgtctccatgctctggtatttcatcgggtctgatggaatacgcattgatgatccttcatacgagcaagaaactctggtaggactcgattttgagacaagctgcatgtggagtctcctcaacatttgtaggcgctctgcaacttctttcatcgttggtctatcatctcctcttgggttcaggcaatgcatggcgagttcagctagtttctgcagtactaccataactttctcgtctatcatgtcaaaatccaacatatcacagtgccttttctggtggaacatcaaggggaaaatatgagataacgcctcatttccattcaaagtatcattgtacagagccttctttctggtcatgatctctaaaagaacaactccgaaactgtaggtatcgcttttgtcagtaagatggtgactgacaaaagtctcagggtcaaggtacccaagagttccttggatgaacatgataaaatcatttctatccatggatttcagtgttgatgctccaaagtctgcaacttttgcattatattcatcatccagtaggatattgagtgatttaacatccccatgcagaattgtgcgagacgttgatgaatgaatgtaagcaagagcctctgctgattgtgtagcaatattcagtcgaagatccagtgggattggtgttcggtgatcattgccatgaaggaactcagagagggttccgttggaaacgaactcatacaccaacatcggtacatctacctccaaacagcaaccaagtaacctcacaatgttcctatgattaatttgtgacaatattattatctcattgacgaattcttctcggcagtcatcgtcaattactttggacttctttatggcaacttctttgtcaccatccaaagttcctctgtagaccattccatgaccaccacatcctagaactcgatcatcgctatagttctctgttgctttcttgatttccttctctgtaagtataagaatggtgtcaacttgtcttgacctcatctcatcaaatagtctaagacctccattttgtttgaaatactcctccttttctttcctatattttcttctttgtaatttcatgaccagcaagcatatcaaagccatcagcacaactgcggaaacactgagacctgcagaatgatttttcaagatgaatcaactcatcgtaaacctgaaaaagctcattagtttcacccaaaggtatactctctgagtctcattaagtccttacctgctatcactcgttcaacttggttaagcacagtttgacatccatagtttgttccatctggccttttacctaccccgcatttgcacaaatagtttcctggtatgttctggcacatcccatgtctgcagggatatagctctttatacttgggatcctccttacgcaacttgcactcatctatgtctgaatagaattgaaacagacaagtatgtatttgggataatacaatcaaagcttgaactattttggcttgttacggaagctgaaaaaaaggtactccctccgtcccaaaatataacaacttttagcacttaggatttgttacaaaatatagcaacttcttcaccaacattccattcccaaccaatcacaaccctccaccattcacttttcccacctacctccacttttcaaccaattacaacctcttcctatttaattctacacactttcttaataaccgtgtctaactctaaaactacttatattctgggatggagggagtaacaaaaagaataaatattacgcagcagcattaaaactggctataattatgttctggttatgttgttattcctggagttgtttatcttggtctccaaatataatctagagaaagtttatatgtatgttaccttgacagcctttgggaagataaggattcccttcatatccttcagagcatttgcacaggtacccttggctattacttgcttgcacacacttgctgtttgaactgacacaggcatagtctttgggcaccttcttcccctctgggcaggagccattcctgatggcccagtcatggatgacaggaacacctctgttggccctcccattgacaaacctgaggtgcccaacgaggtcttgctgcctgaagctgtaccatccggcctccacaagcatggcgtagaagcatgggttgaattcccacaccgcgctctggttcatcaccaagatcgctgcgaagtccttcaggtctgggatgatggtggtctcgcagcagcccatcccagtgcagggagcaccgttggatgtgctgttgatgctctggcagtaggagtagcagccagccacatatagattagagttgctgtgcatgtagccaccaatgatgccgagggtatggcatccgatggccatgaagcggttgcgggtggtggaagggacgaacggcgtaccctccagggtgaaccctgtggtatggttctctggtatggtggtgtttgatgagaaacagatgtaactgactggaccgtaaacgcgcacctcgccacgctccagggagatgtcgatgacctctgtttctgataggaggtctctaaccataggccgtggtggctggaaggtgtcgttgcaggtgatggtgaagtagctgctcaggctggtcgcagaacaaccagcgccgatgccaaatgggtaagggatggatacatttccgcacttgccagggcagcctggcaatgaaattgcaggttcagaggtggtggttgatatcgccattgcatggaagacgatgagcatgaggagaacggatgcttcttgcatggttgcggagttggaggttcttcccagctccctacacatgaagttgtcttggaagttggaaccactgatgctctatgtaaggctgacttagttaaggggaaaacgatgaaagcttcagctaattaatcagctcctaaattctgagcacatataaagccaacccacactatggttaccgaagtttcgaaattttaaggttccgttgtttttccaatgtataccacattatttgtattggatcagaaagaaaatttcatttccacaaatagtcattgtccgactccaattaacaccgatgcctgaatatcccagacaattagtgtatgaactctgaaattgggtatgagttctgaggtgtatatcttcctctgaattttttcctccacttgtaatttatagattatacttctaacagtgatcaggagcactgtaaatttcttactttggattactagccatggatttgaatttgatgctcg

SEQ ID NO: 264 - protein, 133 aa, Oryza sativa
MNQLIVNLKKLISFTQSLWEDKDSLHILQSICTGAIPDGPVMDDRNTSVGPPIDKPEVPNEVLLPEAVPSGLHKHGVEAWVEFPHRALVHHQDRCEVLQVWDDGGLAAAHPSAGSTVGCAVDALAVGVAASHI

SEQ ID NO: 265 - DNA, 1412 bp, Oryza sativa
cacaatttacaaatggggactagagcaaattattaagagtcaactcagcccatttttcaattccaagtttgcagctggatatatctgcttgcatcttgacttgcttggattgtgatggatgactaataacagattaaagagaaccacacctaattcatacatctatttaaactattctagtgtgcatacatcagttcatcccaagaagaagataacacgataggcaaagaagggatagccatagattcttgttgctaggtaagccagctatggcgcatgcacagctgcttgtgtttctgataccaatggccctcttcctgaagttggcaatgccggtggacggtgccatggcgatgccgggctgcccggacaagtgcggcaatgtggctatcccctacccttttggcattggagaaaactgctctgcgaccaacctaaacagctacttcaacctcatgtgcaatgacacctttcatccaccaaggccacaaatccgggaaccggaagcacacatcgaggtcaccggcatctcactggagcgaggcgagatgcgtgtgctcagccctgtcaaccacatctgcttcacgtcgaacaccacatccaccaagtccagtggtgtcgggtatgacctgagcagaactcccttcctcccatcgccgtcgcgcaaccgcttcacggtcatcggttgcaacaccctggggctcatcactggctacaggggtgcctcgggacaatacgtgactgggtgctactcctactgtgagggtatcaacagcacctctgatggggcaccgtgtgccgggatggggtgctgtgaggcttccatacctgccaacctcactgccttcgccgtgacatttgatctgaaccacagcaaggtgtggaccttcaacccttgcttctactctgtcgtcgccgaggtcgggtggtacaatttcaagaagcaggatcttgttggtcacctcggattcatcaaggaaagagcccagaatggtgttcctattgtcgctgactgggccattaggaatggctcatgcccaaagaagggggaaaaagaacctagcagctatgcctgcgttagtgcaaacagctattgcacggccgtgataaatagtccagggtatttgtgcaactgctcacaaggatatgggggaaatccttatctttcagatggctgccaaggttcagcaattactcaaatttacttgaattttgttacttattaaacattgatttagtaggctgaactgaactcgtattttgtttgattttattgagtggttatattgttcttggtatcttcagacatagatgagtgtgagatgcgtaagctggaccccaagtatgaagaattatatccatgcagaaaaggggtctgtcagaacacaccaggaagctacatatgcaaatgc

SEQ ID NO: 266 - protein, 298 aa, Oryza sativa
MPVDGAMAMPGCPDKCGNVAIPYPFGIGENCSATNLNSYFNLMCNDTFHPPRPQIREPEAHIEVTGISLERGEMRVLSPVNHICFTSNTTSTKSSGVGYDLSRTPFLPSPSRNRFTVIGCNTLGLITGYRGASGQYVTGCYSYCEGINSTSDGAPCAGMGCCEASIPANLTAFAVTFDLNHSKVWTFNPCFYSVVAEVGWYNFKKQDLVGHLGFIKERAQNGVPIVADWAIRNGSCPKKGEKEPSSYACVSANSYCTAVINSPGYLCNCSQGYGGNPYLSDGCQGSAITQIYLNFVTY

SEQ ID NO: 267 - DNA, 2825 bp, Oryza sativa
atcgaagccatggcgaccgcgccgccgccgtcgacggcgatgtcccgccgcagcacccagccggcgagcaagacggcgcgccggcaaggaggcgagctccggtgcggccgtggtcgcgcggaggagcaagtagaaggctccggaggcggcgaacctgaccgaatgcgtcgcaggcgtagcttcccccttcgtcccatcgccggcgaacatcaccagatcagatgaaactgtacaagagggggaattttcctctggattagtattcaatttccagtttcccaccaagtagggcaatatcaaggttgaattatccgtggcaacttgcgctgttcacgtacacactcatgatagttactgatggatacatcgtaaatttactacttgcaatggggactagaggaaataaatcataagagtgacagcgcaggctgcagcttcttctgggtacagtatggcgttgccaggttgccctgacaagtgcggaaacatttccatcccctaccctttcggcatcggccccagctgtgctgcaaccagcatcagcagctacttcaatctcacctgcaacaacaccttcaacccaccacggcctatggttggggactctgaagcactcgtcgaggtcactgacatctcactggagcacggcgagatgcgggtactcagccctgtctactacatctgcttcacggcaaataccacgttcaccaggttcaccgaagggtatgagctgaagcacacacccttcctcccctccccgtcacgcaaccgcttcacggtcatcggttgcaacaccctggggctcatcggtggctacaagggaaccgtgagccactatgtgactggttgctactcctattgtgagagcatcaacagcacatctgatggggcgccatgtgcagggatgggctgctgcgaggccgccataccgactgacctcaccgcctggggggcgatgtttgagatgaaccagagcaaggtatggagcttcaacccgtgtttctatgccatggtcagtgaggttgggtggtacagcttccagcagaaggaccttgttggccaccttgggttcatagatgacagagctcagaggggagcacctgttgtggctgattgggccattaggaatggctcatgcccggaagaggggaaaggcatacctggtgattatgcgtgcatcagcgcaaacagctactgcatggacgcgaacaatggtccagggtacttatgccagtgctccaaagggtatgagggcaacccttatcttctgaacggctgccaagacgtggatgagtgcgcattacgtaagcaggatcccaagtatgaagatatatatccttgcaggaaaggagtctgccacaacacaccaggaggatatttatgcaaatgcaagttaggaaaaagatctgatggtacaaattatggatgtcgacctctgcgtactacagcagagcaagtggttattggcaccagtgtttcggccattgcgctaatggctttgacatgcgtgttggccatgcaaatacaaaggaaaaggcataagaaggacaaagatgagtatttcaagcaaaatggaggtctaaagctatatgatgagatgagatcaaggaaggtagacacaatccgcatactcactgaaaaagatataaaaaaggccactgacaactacagtgaagatcgagttcttggaattggaggtcacggaatggtctacagaggaactttggatgacaacaaagaggtagccataaagaagtccaaagtaattaacgatgaatggagggaagaatttgtcaatgagataataatcttgtcacagatcaaccacagaaacattgtgaggttgataggatgttgcctggatgtacatgtccccatgttggtctacgagtttgtctccaatgggaccttgtctgagttcctccatggcactgatcatagatcaccaatccccttggacattcgcctgaaaatagccacacaatcagcagaagctctagcgtacctgcactcatcaacatctcgcacaatccttcatggggatttcaaatcggccaatattcttttggatggtcagcacaatgcaaaggttgcagattttggggcatcagcgctgaagtccatgaacgaaagtgagttcatcatgtttgtccaaggaactttgggctaccttgacccggagagcttcattagccattgtcttaccgacaagagtgatgtctacagttttggggtggttctgctggagctgatgacaagaaagagggcaatctttgccaatagcatcaatgaaaaggaatcattgtcctattcttttctcctgatgtttgatcagaacattcaccggaatatgctggacagagaaattatggataaagaaaccatggttgttcttgagaaactttccattcttgccgccaactgcctgcgaccaagaggagatgaccggccaacgatgaaggaagttgcagagtgcctacagatgataaggagacacccaatgcacgcagctagtgatcacaaaggagacagctctgcgcatcacaactatgaaggatcttcatcaccatcaatgtctgcccatttcgacgaaacgatatacaagagcatagaggcatccagattggtacaagatcttgtgagatgatggtatgcttgtgccagcacttaatgtgttaatatcttgtgtagatatcatagtaaatacggtataaaccaatttctgtaatccccttgtatgagaaaattagcaatttgttccccgtggtgatgactgatgatgaatgcttccattctgaataaatattcagttgtacagagtccaa

SEQ ID NO: 268 - protein, 731 aa, Oryza sativa
MALPGCPDKCGNISIPYPFGIGPSCAATSISSYFNLTCNNTFNPPRPMVGDSEALVEVTDISLEHGEMRVLSPVYYICFTANTTFTRFTEGYELKHTPFLPSPSRNRFTVIGCNTLGLIGGYKGTVSHYVTGCYSYCESINSTSDGAPCAGMGCCEAAIPTDLTAWGAMFEMNQSKVWSFNPCFYAMVSEVGWYSFQQKDLVGHLGFIDDRAQRGAPVVADWAIRNGSCPEEGKGIPGDYACISANSYCMDANNGPGYLCQCSKGYEGNPYLLNGCQDVDECALRKQDPKYEDIYPCRKGVCHNTPGGYLCKCKLGKRSDGTNYGCRPLRTTAEQVVIGTSVSAIALMALTCVLAMQIQRKRHKKDKDEYFKQNGGLKLYDEMRSRKVDTIRILTEKDIKKATDNYSEDRVLGIGGHGMVYRGTLDDNKEVAIKKSKVINDEWREEFVNEIIILSQINHRNIVRLIGCCLDVHVPMLVYEFVSNGTLSEFLHGTDHRSPIPLDIRLKIATQSAEALAYLHSSTSRTILHGDFKSANILLDGQHNAKVADFGASALKSMNESEFIMFVQGTLGYLDPESFISHCLTDKSDVYSFGVVLLELMTRKRAIFANSINEKESLSYSFLLMFDQNIHRNMLDREIMDKETMVVLEKLSILAANCLRPRGDDRPTMKEVAECLQMIRRHPMHAASDHKGDSSAHHNYEGSSSPSMSAHFDETIYKSIEASRLVQDLVR

SEQ ID NO: 269 - DNA, 2969 bp, Oryza sativa
gtcactcgctcagcacaagtttagacatctcaatgctatctgtcatctcgtccattacgctgctaactgtcatctcgtccaaatggatgaccaccgatggtgatcctccaaacttgccatggatgtcgcgactggtggcggcggttagccgcagcctggcggctttggatcggcggcgcaagaaatcccagactcctttcctgcaaggatatatatcttcatacttgggatcctgcttacgtaatgcgcactcatccacgtctgaagacagagacaaaaagcatgcattcagaagtcaaactaaacttgtgtaagctagtctgtattactttcattatcataggtaaactaaaatcaacctaatctacttataagaatgctataacttgcctttcatgacttgttccaaaataacttttcactatttaattaaaaatccgcaatacaaatgaagctgactgtttctttttccagtcccatgctgaattatgctggaaaccaaagagaactgctgcctattgactgaaaataacttttcactatttaattaaaaatccgcaccacaaatgaagctgactgtttctttttccagtcccatgctgaattatgctggaaaccaaagagaactgctgcctattgatgaatgttcataatattttgaactatatcttacacactctagctgaacaaacactgagcacgccatagaattctaccagttttgtttctcaaaatctaaaccaatggtaaatttgaacctaaccttggcagccgttcagaagataagggttgccctcataccctttggagcactggcataagtaccctggaccattgttcgcgtccatgcagtagctgtttgcgctgatgcacgcataatcaccaggtatgcctttcccctcttccgggcatgagccattcctaatggcccaatcagccacaacaggtgctcccctctgagctctgtcatctatgaacccaaggtggccaacaaggtccttctgctggaagctgtaccacccaacctcactgaccatggcatagaaacacgggttgaagctccataccttgctctggttcatctcaaacatcgccccccaggcggtgaggtcagtcggtatggcggcctcgcagcagcccatccctgcacatggcgccccatcagatgtgctgttgatgctctcacaataggagtagcaaccagtcacatagtggctcacggttcccttgtagccaccgatgagccccagggtgttgcaaccgatgaccgtgaagcggttgcgtgacggggaggggaggaagggtgtgtgcttcagctcatacccttcggtgaacctggtgaacgtggtatttgccgtgaagcagatgtagtagacagggctgagtacccgcatctcgccgtgctccagtgagatgtcagtgacctcgacgagtgcttcagagtccccaaccataggccgtggtgggttgaaggtgttgttgcaggtgagattgaagtagctgctgatgctggttgcagcacagctggggccgatgccgaaagggtaggggatggaaatgtttccgcacttgtcagggcaacctggcaacgccatactgtacccagaagaagctgcagcctgcgctgtcactgcaaggaagatgatgcttggtatgagcttcattgcaagggctaatgcttcttgcatggctgggtgctttggggtcacttgatctggggttgtgtaagtagctacacctggcttaataccatttactcagtgtacttgtatgaaaattgcatatatacctattttgggggaaatattaaaactggatatatccctgttcaattctgatgtatatatgcacatgctagaaaggattaaataaatatgaagtaggtagtgattgcaatacatgatgtgcaaaatacatccatctgcaaattgcagagaaaaatggaaccggacttacctcttatgatttatttcctctagtccccattgcaagtagtaaatttacgatgtatccatctgcaaattgcagagaataatgaacccagacttgactcttatgatttatttcctctgattcccattgcacgttgtaaatttatgatgtactattagagaaatttccaaccataccagtaactatcatgagtgtgtacgtgaacagcgcaagttgccacggataattcaaccttgatattgccctacttggtgggaaactggaaattgaatactaatccagaggaaaattccccctcttgtacagtttctttaagaaaatggaaaccaaaaacaaaatcagatttaaatccataccattatttcgtgccgcaggatggatggagacatgagagggagagagaaagcaaaccatctgatctggtgatgttcgccggcgatgggacgaagggggaagctacgcctgcgacgcattcggtcaggttcgccgcctccggagccttctacttgctcctccgcgcgaccacggccgcaccggagctcgcctccttgccggcgcgccgtcttgctcgccggctgggtgctgcggcgggacatcgccgtcgacggcggcggcgcggtcgccatggcttcgatggggatcccgacttccctgaggcccatataagttgggccagaacgagatctcgatcacgtgcggcccaataacaggatcacaccctacgtgcggaatggactttcatgcggcccatttattatggggaatggtacaagatggtatcccatttggatgggttgatacctgtaagatatcatctcgtcctgtatcagttgatacctcaaaagtatcatcccgtccgaacaggataccatcctatagcatttcccaaaataaataggttttacgatctattttggactataaattagttcacggttagtcaccttagttctgcaactcaaaacagtaggaaaactgcaaaagagaataaattgtgacggcttgttcaagagttt

SEQ ID NO: 270 - protein, 93 aa, Oryza sativa
MLSVISSITLLTVISSKWMTTDGDPPNLPWMSRLVAAVSRSLAALDRRRKKSQTPFLQGYISSYLGSCLRNAHSSTSEDRDKKHAFRSQTKLV

SEQ ID NO: 271 - DNA, 2675 bp, Arabidopsis thaliana
atacaggaataagcagcagcgtacttaaacgtcctcttcactggttacgttggttgtgtagttgaattttagtcttcttgcaatttctgggaaaatgggaaggggcctgcgaaaatgagtgagagagaacatctcgtatacagttgtttcttataagaacaaggagattagcgaaaaaaactcaaaagaggaacagagttagagagagagagagagagagaaataaagagagaagagaggtagaagatgaaggtgcaggagggtttgttcttggtggctattttcttctcccttgcgtgtacgcagctggtgaaggggcaacatcaacctggtgagaattgccaaaataaatgtggcaacatcacaatagagtacccttttggcatttcttcaggttgttactatcccggaaatgaaagtttcagtatcacctgtaaggaagataggccacatgtcttaagcgacattgaagtggcaaactttaatcacagcggccagctacaagttctgcttaatcgatcctctacttgctacgacgagcaaggaaaaaaaactgaggaggacagttcttttacactggaaaatttatctctttccgccaacaacaagttaactgcagtaggctgtaacgctttatcacttctggacacttttggaatgcaaaactactcaactgcatgcttgtcattatgcgattctcccccagaggctgatggagaatgtaatggtagaggttgctgcagagtcgacgtttctgccccgttggatagctatacattcgaaactacatcaggtcgcatcaagcacatgacttcttttcacgactttagtccttgcacctacgcttttctcgttgaagatgataagttcaacttcagttctacagaagatcttctgaatctgcgaaatgtcatgaggttccctgtgttactagattggtctgttggaaatcagacatgcgagcaagttggaagcacaagcatatgcggtgggaacagcacttgtctcgattctactcctagaaacgggtatatctgcagatgcaatgaaggctttgatgggaatccatacctttcagctggttgccaagacgtcaatgagtgtactactagtagtactatccatagacataactgttcggatcccaaaacctgtagaaacaaggttggaggcttctattgtaagtgtcaatctggttaccgcttagataccaccactatgagctgcaagcgtaaagagtttgcatggactacaattcttcttgtaaccaccatcggcttcttggtcattctgcttggcgttgcctgtatacaacagagaatgaagcacctgaaggacaccaagctccgagaacaattcttcgagcaaaatggtggcggcatgttgacacaacgactctcaggagcagggccgtcaaatgttgatgtcaaaatctttactgaggatggcatgaagaaagcaacaaatggttatgctgagagcaggatcctgggtcagggtggccaaggaacagtgtacaaagggatattgccggacaactccatagttgctataaagaaagcccgacttggagacagtagccaagtagagcagttcatcaatgaagtgctcgtgctttcacaaatcaaccataggaacgtagtcaagctcttgggctgctgtctagagactgaagttcccttgttggtctatgagttcatcaccaatggcacccttttcgatcacttgcatggttccatgattgattcttcgcttacatgggaacaccgtctgaagatagcaatagaagtcgctggaactcttgcatatcttcactcctctgcttctattccaatcatccatcgggatatcaaaactgcaaatattcttctggatgtaaacttaactgcaaaagtagctgactttggtgcttcaaggctgataccaatggataaagaagagctcgaaactatggtgcaaggcactctaggttacctagacccagaatattacaacacagggttgttaaacgaaaagagcgatgtttatagttttggggtcgtcctaatggaactgctctcaggtcaaaaggcattgtgctttaaacggccacagtcctcaaaacatctggtgagttactttgcgactgccacaaaagagaataggttggatgagattattggcggcgaagtgatgaacgaggataatctgaaggagatccaggaagctgcaagaattgctgcagagtgtacaaggctaatgggagaggaaaggccaaggatgaaagaagtagctgcaaagctagaagccttgagggtcgaaaaaaccaaacataagtggtcggatcagtaccctgaggagaatgaacacttgattggtggtcacatcttgtcagcacaaggcgaaaccagtagcagcattggctatgacagcatcaagaatgtagcaatattggacattgaaactggccgctgatattacaaattcacatgtatttcttttgtttgtaagaaaaaaaaaactacctctttgttgcttcatcaataatgctttgcttcattaataatgatttgaaagaatttttataaatcatcaataaccatgtttgtaattcccattggtatactaaccagtagccaatctggttataggcaaacttagaaactcttttgcaaaatagcagattaccaatatca

SEQ ID NO: 272 - protein, 735 aa, Arabidopsis thaliana
MKVQEGLFLVAIFFSLACTQLVKGQHQPGENCQNKCGNITIEYPFGISSGCYYPGNESFSITCKEDRPHVLSDIEVANFNHSGQLQVLLNRSSTCYDEQGKKTEEDSSFTLENLSLSANNKLTAVGCNALSLLDTFGMQNYSTACLSLCDSPPEADGECNGRGCCRVDVSAPLDSYTFETTSGRIKHMTSFHDFSPCTYAFLVEDDKFNFSSTEDLLNLRNVMRFPVLLDWSVGNQTCEQVGSTSICGGNSTCLDSTPRNGYICRCNEGFDGNPYLSAGCQDVNECTTSSTIHRHNCSDPKTCRNKVGGFYCKCQSGYRLDTTTMSCKRKEFAWTTILLVTTIGFLVILLGVACIQQRMKHLKDTKLREQFFEQNGGGMLTQRLSGAGPSNVDVKIFTEDGMKKATNGYAESRILGQGGQGTVYKGILPDNSIVAIKKARLGDSSQVEQFINEVLVLSQINHRNVVKLLGCCLETEVPLLVYEFITNGTLFDHLHGSMIDSSLTWEHRLKIAIEVAGTLAYLHSSASIPIIHRDIKTANILLDVNLTAKVADFGASRLIPMDKEELETMVQGTLGYLDPEYYNTGLLNEKSDVYSFGVVLMELLSGQKALCFKRPQSSKHLVSYFATATKENRLDEIIGGEVMNEDNLKEIQEAARIAAECTRLMGEERPRMKEVAAKLEALRVEKTKHKWSDQYPEENEHLIGGHILSAQGETSSSIGYDSIKNVAILDIETGR

SEQ ID NO: 273 - DNA, 2469 bp, Arabidopsis thaliana
aggagattagcgaaaactcaaaacaggaacaaagttaaaagagtgagagagaaagaaagagagaagatgaaggtacaggagggtttgttcgtggtggctgttttctaccttgcttatacgcagctagtcaaggggcaacctcgcaaggagtgccaaactagatgtggcaatgtcgcagttgagtacccttttggtacttctccaggttgttactatcccggagatgaaagtttcaatcttacttgcaacgagcaagagaagctcttctttggcaacatgccagtcatcaacatgtctctcagcggccagcttcgtgttcggctagttagatccagagtttgctacgatagtcaaggaaaacagactgactacattgcccagcggaccaccctgggtaatttcactctctctgaacttaacagatttactgtagtaggttgtaacagttacgcatttctccgcacatctggagttgaaaaatactcaactggatgcatatcaatatgtgattctgccacaacgaaaaacggatcatgttctggtgaaggttgctgccagatccctgtccctagaggatactcttttgtcagagtaaaaccacatagctttcacaaccatcctactgtgcatctgtttaatccttgcacctacgcctttctcgttgaagatggtatgtttgacttccatgctttggaagatctcaacaatctgcgaaatgttactacgttccctgtagtactagattggtctatcggagacaagacttgcaaacaagtagaatacaggggcgtgtgtggtggtaacagcacatgtttcgattctactggtggaaccgggtataactgcaaatgtttagaaggttttgaggggaatccataccttccaaacggttgtcaagacatcaatgaatgtattagtagtagacataactgttcggagcatagtacctgtgaaaacacgaaggggagcttcaactgtaactgcccatctggttaccgcaaagattcccttaatagctgtactcgtaaagtcaggcctgaatactttagatggactcaaatttttcttggaaccaccatcggcttctcggttatcatgcttgggattagctgtctacaacagaaaattaagcaccggaagaacacagagctccgacaaaaattcttcgagcaaaatggtggaggcatgttgatacagcgagtctcgggagcagggccatcaaatgttgatgtcaaaatcttcactgagaaaggaatgaaggaagcaactaatggttaccatgagagcagaatcctgggtcagggaggccaaggaacagtgtacaaagggatattgccggacaactccatagttgctataaagaaagctcggcttggaaaccgtagccaagtagagcagttcatcaacgaagtgctagtgctttcacaaatcaaccataggaacgtggtcaaggtcttggggtgttgtttagagacagaagtccccttgttggtctatgagttcattaacagtggtacccttttcgatcacttgcacggttccttgtatgattcttcacttacatgggagcaccgtctgaggatagcaacagaagtagcaggaagtcttgcatatcttcactcttctgcttctattccaatcatccaccgagatatcaagactgctaatattctcctggataaaaacttaactgcaaaagtagctgactttggtgcatcaagattgataccgatggataaagagcagctcacaacaatagtgcaaggcactctaggttacctagacccagaatattacaacacagggttgttaaacgaaaagagcgatgtttatagttttggggtcgtcctaatggaactgctctcaggtcaaaaggcattgtgtttcgaaagaccacattgcccaaaaaatcttgtgagttgttttgcttctgccacaaagaataataggttccatgaaattattgatgggcaagtgatgaatgaggataaccagagagagatccaggaagctgcaagaattgctgcagagtgtacaaggctaatgggagaggaaaggccaaggatgaaagaagtagctgcagagttagaggccttgagagttaaaacaactaaatataagtggtcggatcagtatcgtgagacaggggagattgaacacttgctcggcgttcaaatcttgtcagcacaaggcgaaaccagtagcagcattggctatgacagcatcagaaatgtaacaacattggacattgaagctggccgttgatattaatgctctgacaaaatcacatgtatatcttttgtttgtaaaaaaagaaagtcatttccttgttgcttcatcaataatgctttgacagatttgtttgtacatcatcaataatcatgttcatattttcctttacttggtatactaaccagtaaccgatctggttattggcaaatttaaaactcttgtgttaaattttagttc

SEQ ID NO: 274 - protein, 732 aa, Arabidopsis thaliana
MKVQEGLFVVAVFYLAYTQLVKGQPRKECQTRCGNVAVEYPFGTSPGCYYPGDESFNLTCNEQEKLFFGNMPVINMSLSGQLRVRLVRSRVCYDSQGKQTDYIAQRTTLGNFTLSELNRFTVVGCNSYAFLRTSGVEKYSTGCISICDSATTKNGSCSGEGCCQIPVPRGYSFVRVKPHSFHNHPTVHLFNPCTYAFLVEDGMFDFHALEDLNNLRNVTTFPVVLDWSIGDKTCKQVEYRGVCGGNSTCFDSTGGTGYNCKCLEGFEGNPYLPNGCQDINECISSRHNCSEHSTCENTKGSFNCNCPSGYRKDSLNSCTRKVRPEYFRWTQIFLGTTIGFSVIMLGISCLQQKIKHRKNTELRQKFFEQNGGGMLIQRVSGAGPSNVDVKIFTEKGMKEATNGYHESRILGQGGQGTVYKGILPDNSIVAIKKARLGNRSQVEQFINEVLVLSQINHRNVVKVLGCCLETEVPLLVYEFINSGTLFDHLHGSLYDSSLTWEHRLRIATEVAGSLAYLHSSASIPIIHRDIKTANILLDKNLTAKVADFGASRLIPMDKEQLTTIVQGTLGYLDPEYYNTGLLNEKSDVYSFGVVLMELLSGQKALCFERPHCPKNLVSCFASATKNNRFHEIIDGQVMNEDNQREIQEAARIAAECTRLMGEERPRMKEVAAELEALRVKTTKYKWSDQYRETGEIEHLLGVQILSAQGETSSSIGYDSIRNVTTLDIEAGR

SEQ ID NO: 275 - DNA, 2354 bp, Arabidopsis thaliana
atgaagttccaggagggtgtgttcttggtggttattttcttccttgcatatactcagcttgtgaaggggcaacatcaacctcgcgaagattgtaaacttaaatgtggaaacgtcacaatagagtacccttttggtatttctacaggttgttactatcccggagatgataatttcaatctcacctgtgtcgtggaagagaagctactactctttggcatcattcaagtgaccaatatttctcacagtggccatgtaagtgtactgtttgaacgattctctgaatgctacgagcagaaaaatgagactaatggaactgccctcgggtatcagctgggtagtagtttctctctctcctccaacaacaagtttactttagtaggatgtaacgctttatcacttttgagcacttttggaaagcaaaactactcaactggatgcttgtcattatgcaattctcaaccagaggcaaatggaagatgtaatggtgtaggttgctgcacaacagaggacttctctgtcccgttcgatagcgatacattccaatttggctcagttcgcttgagaaaccaagttaataattccttagatctatttaatacttcggtatatcagtttaatccttgcacctacgcttttctcgttgaagatggtaagtttaacttcgattcttcaaaagatcttaagaatctgaggaatgtcacgaggttccctgtggcactagattggtctattggaaaccagacatgtgagcaagctggaagcacaagaatatgcggtaagaacagctcatgttacaattctactactagaaacgggtatatctgcaaatgtaatgaaggttatgatgggaatccataccgttcagagggttgcaaagacatcgatgagtgtattagtgatacacataactgttcggatccaaaaacctgtagaaacagggatggaggcttcgattgtaagtgtccatctggttacgacttaaactccagtatgagctgcacgaggcccgaatacaaacggactcgaatttttcttgtaatcataatcggcgtcttggtcctcctgcttgctgcgatctgtatacaacatgcaacgaagcaaaggaagtataccaagctccgacgacaattctttgagcaaaatggtggtggcatgttgatacagcgactttcaggagcagggttgtcaaacattgatttcaaaatctttactgaggaaggcatgaaagaggcaactaatggctatgatgagagcagaatcttgggccagggaggtcaaggaacagtctacaaagggatattgccggacaacactatcgttgctataaagaaagctcggcttgcagacagtagacaagtagatcagttcatccacgaagtgctcgtgctttcacaaattaaccacaggaacgtggtcaagatcttgggttgctgtctagagactgaagtccccttgttggtctatgaattcattaccaatggcacccttttcgatcacttgcacggttccatttttgattcttctcttacatgggaacaccgcctcagaatagcgatagaagtcgctggaactcttgcttatcttcactcctctgcttctattccaatcatccatcgcgatatcaaaactgcaaatattctcttggatgaaaacttaactgcaaaagtagccgactttggcgcttctaagcttataccaatggataaagagcagctcacaactatggtgcaaggcactctaggctatttagacccagaatactataccacagggcttctgaacgagaagagcgatgtgtatagctttggggtagtcctcatggaactgctctcaggtcaaaaggcattgtgctttgaacggccacaggcttcaaaacatttggtgagttactttgtttctgccacggaagagaataggttgcatgagattattgacgaccaagtgttgaacgaggataatctgaaggagatccaggaagctgcaagaattgctgcagagtgtacaaggctaatgggagaggaaaggccaaggatgaaagaagtagctgcaaagctagaagccttgagggtcgagaaaaccaaacataagtggtcggatcagtatcctgaggagaatgaacacttgattggtggtcacatcttgtctgcacaaggcgaaaccagtagcagcattggctatgatagcatcaaaaatgtagcaatattggacattgaaactggccgctgatattgctcacaaaatcacatgtatctcttttgtttgtaaaaaaagaaaaccacttatttgttgcttcatcaatatgctttgagagcttgtttgttcatcatcaataatcatgttcatattttccttta

SEQ ID NO: 276 - protein, 741 aa, Arabidopsis thaliana
MKFQEGVFLVVIFFLAYTQLVKGQHQPREDCKLKCGNVTIEYPFGISTGCYYPGDDNFNLTCVVEEKLLLFGIIQVTNISHSGHVSVLFERFSECYEQKNETNGTALGYQLGSSFSLSSNNKFTLVGCNALSLLSTFGKQNYSTGCLSLCNSQPEANGRCNGVGCCTTEDFSVPFDSDTFQFGSVRLRNQVNNSLDLFNTSVYQFNPCTYAFLVEDGKFNFDSSKDLKNLRNVTRFPVALDWSIGNQTCEQAGSTRICGKNSSCYNSTTRNGYICKCNEGYDGNPYRSEGCKDIDECISDTHNCSDPKTCRNRDGGFDCKCPSGYDLNSSMSCTRPEYKRTRIFLVIIIGVLVLLLAAICIQHATKQRKYTKLRRQFFEQNGGGMLIQRLSGAGLSNIDFKIFTEEGMKEATNGYDESRILGQGGQGTVYKGILPDNTIVAIKKARLADSRQVDQFIHEVLVLSQINHRNVVKILGCCLETEVPLLVYEFITNGTLFDHLHGSIFDSSLTWEHRLRIAIEVAGTLAYLHSSASIPIIHRDIKTANILLDENLTAKVADFGASKLIPMDKEQLTTMVQGTLGYLDPEYYTTGLLNEKSDVYSFGVVLMELLSGQKALCFERPQASKHLVSYFVSATEENRLHEIIDDQVLNEDNLKEIQEAARIAAECTRLMGEERPRMKEVAAKLEALRVEKTKHKWSDQYPEENEHLIGGHILSAQGETSSSIGYDSIKNVAILDIETGR

SEQ ID NO: 277 - DNA, 2217 bp, Arabidopsis thaliana
atgaaagtgcagcgtctgttcttagtagctattttctgcctctcttatatgcagctggtcaaggggcaaaccttgcctcgttgccccgaaaaatgtggcaacgttacacttgagtacccttttggcttttctccaggttgttggcgtgccgaagatcctagtttcaatctcagttgtgtgaacgagaatctattctataagggccttgaagtggtcgaaatatctcacagcagccagttacgcgtcctatatcctgcatcctacatttgctacaacagcaaaggaaagttcgctaaagggacttactactggagtaatctaggtaatttgactctctccggcaacaacacgattactgcattaggctgtaactcgtacgcttttgtgtcctctaatggaactcgaagaaactcagttggatgcatatcagcatgtgatgctctttcccatgaagcaaatggagaatgtaatggtgaaggctgctgccagaaccccgtccctgcagggaacaattggttaatagtcagatcatatcgctttgacaacgacacgtcagtgcaacctatctctgagggtcaatgcatctacgcctttctcgttgaaaatggcaagtttaagtacaatgcttcggacaaatattcttatctgcagaataggaatgtggggtttcctgtggtcttggattggtctattaggggagagacatgtgggcaagttggagaaaagaaatgcggtgtgaatggcatatgttccaattctgctagtgggatcgggtatacatgcaaatgcaaaggaggtttccaggggaatccatatcttcaaaacggttgccaagacatcaatgagtgtactactgctaatcctatccataaacataactgctcgggtgacagcacctgtgaaaacaagttgggacacttccgttgtaattgtcgatctcgttacgaattaaataccaccactaatacctgcaaacctaaaggcaatcctgaatacgttgaatggactacaattgttcttggaaccactatcggcttcttggtcattctgcttgccattagctgtatagaacataaaatgaagaacaccaaggacaccgagctccgacaacaattcttcgagcaaaatggtggcggcatgttgatgcagcgactctcaggagcagggccatcaaatgttgatgtcaaaatcttcactgaggaaggaatgaaggaagcaactgatggttatgatgagaacagaatcttgggccagggaggccaaggaacagtctacaaaggtatattaccggacaactccatagttgctataaagaaagctcggcttggagacaatagccaagtagagcagttcatcaatgaagtgcttgtgctttcacaaatcaaccataggaacgtggtcaagctcttgggctgctgtctagagactgaagttcccttgttggtctatgagttcatttccagtgggacccttttcgatcacttacacggttctatgtttgattcttctctaacatgggaacatcgtttgagaatggctgtagaaatagctggaactcttgcttatcttcactcctctgcttctataccaatcatccatcgcgatatcaaaactgcaaatattcttctggatgaaaacttaactgcaaaagtagctgactttggtgcttcaaggctgataccaatggataaagaagacctcgcaactatggtgcaaggaactctaggttacctagacccagaatattacaacacagggttgctaaacgaaaagagcgatgtttatagctttggggtagtcctaatggaactgttatcaggtcaaaaggcattgtgctttgaaaggccacagacttcaaaacatatagtgagttactttgcctcagccacgaaagagaataggttgcacgagattattgatggccaagtgatgaacgagaataatcagagggagatccagaaagctgcaagaattgctgttgagtgtacaagattgacgggagaagaaaggccagggatgaaggaagtagctgcagagcttgaggccttgagagtcacaaaaaccaaacataagtggtcagatgagtatcctgaacaggaggatactgagcacttggttggtgttcaaaaattatcagcacaaggcgaaaccagcagcagcattggctatgatagtatcaggaatgtagcaatactggacattgaagcaggccgctga

SEQ ID NO: 278 - protein, 738 aa, Arabidopsis thaliana
MKVQRLFLVAIFCLSYMQLVKGQTLPRCPEKCGNVTLEYPFGFSPGCWRAEDPSFNLSCVNENLFYKGLEVVEISHSSQLRVLYPASYICYNSKGKFAKGTYYWSNLGNLTLSGNNTITALGCNSYAFVSSNGTRRNSVGCISACDALSHEANGECNGEGCCQNPVPAGNNWLIVRSYRFDNDTSVQPISEGQCIYAFLVENGKFKYNASDKYSYLQNRNVGFPVVLDWSIRGETCGQVGEKKCGVNGICSNSASGIGYTCKCKGGFQGNPYLQNGCQDINECTTANPIHKHNCSGDSTCENKLGHFRCNCRSRYELNTTTNTCKPKGNPEYVEWTTIVLGTTIGFLVILLAISCIEHKMKNTKDTELRQQFFEQNGGGMLMQRLSGAGPSNVDVKIFTEEGMKEATDGYDENRILGQGGQGTVYKGILPDNSIVAIKKARLGDNSQVEQFINEVLVLSQINHRNVVKLLGCCLETEVPLLVYEFISSGTLFDHLHGSMFDSSLTWEHRLRMAVEIAGTLAYLHSSASIPIIHRDIKTANILLDENLTAKVADFGASRLIPMDKEDLATMVQGTLGYLDPEYYNTGLLNEKSDVYSFGVVLMELLSGQKALCFERPQTSKHIVSYFASATKENRLHEIIDGQVMNENNQREIQKAARIAVECTRLTGEERPGMKEVAAELEALRVTKTKHKWSDEYPEQEDTEHLVGVQKLSAQGETSSSIGYDSIRNVAILDIEAGR

SEQ ID NO: 279 - DNA, 2202 bp, Arabidopsis thaliana
atgaaggtgcatagtctgttcttgatggctattttcttctacctagcatatacgcagctggtcaaggcgcaacctcgcgatgattgccaaactagatgtggtgacgtcccaattgattacccttttggtatttctacaggttgttactaccccggagatgatagcttcaatattacctgtgaggaagataaaccaaatgtcttaagcaacattgaagtgctaaactttaatcatagcggccagctacgcggtctgattcctcgatccactgtttgctacgaccagcaaacaaataatgatttcgagtccctctggtttcggttggataatttatctttctcccccaataacaagtttactttagtaggctgtaacgcttgggcacttctaagcacttttggaatacaaaactactcaactggatgtatgtcattatgcgatactcccccgccgccaaatagtaaatgtaatggtgttggttgctgcagaacagaggtatctatccccttggatagccatagaattgaaactcaaccatctcgcttcgaaaacatgacttccgtggagcactttaatccttgcagctacgcttttttcgttgaagatggtatgtttaacttcagttctttagaagatcttaaggatctgcgaaatgtcacgaggttccctgtgttactagattggtctattggaaaccagacatgtgagcaagttgtaggtagaaacatatgtggtgggaacagcacatgttttgattctactcgtggaaagggttataactgcaagtgtttacaaggttttgatgggaatccatacctttcggacggttgccaagacatcaatgagtgtactacccgtatacataactgttcggataccagcacatgtgaaaacacacttggaagcttccattgtcagtgcccatctggttctgatttaaataccactactatgagctgcattgacacacctaaagaagagcctaagtacttaggatggactactgttcttcttggaaccaccatcggattcttaatcatcttgcttaccattagctatatacaacaaaaaatgaggcaccgaaaaaacaccgagctgcgacaacaattcttcgagcaaaatggtggtggcatgttgatacagcgactctcaggagcagggccatcaaatgtggatgtcaaaatctttactgaagaaggcatgaaggaagcaactgatggttataatgagagcagaatcctaggccagggaggacaaggaacagtctacaaagggatattgcaagataactccattgttgctataaagaaagctcgacttggagaccgtagccaagtagagcagttcatcaacgaagtgctagtgctttcacaaataaaccacaggaacgtggtcaaactcttgggctgttgtctagagactgaagttcccttgttggtctatgagttcatttccagtggcactctttttgatcacttgcacggttctatgtttgattcttcgcttacatgggaacaccgtctgaggatagccatagaagttgctggaactcttgcatatcttcactcctatgcttctattccaatcatccaccgagatgtcaagactgctaacattctcctcgatgaaaacttaactgcaaaagtagctgattttggtgcatcaaggctgataccgatggaccaagagcagctcacaactatggttcaaggaactcttggctatttagaccctgaatactacaatacagggcttctgaacgaaaagagcgatgtttatagctttggggtagtcctcatggaactgctctcaggtgaaaaggcattatgctttgaacggccacaaagctcaaaacatctagtgagttactttgtttctgccatgaaagaaaataggttgcatgagattattgacggtcaagttatgaacgagtataatcagagggagatccaggaatctgcaagaattgctgttgagtgtacaagaattatgggagaggaaaggccaagtatgaaagaagtagctgcagagttagaggccttgagagtcaaaacaaccaaacatcagtggtcagatcaatatcccaaggaggttgagcatttgcttggtgttcaaatcttatcgacgcaaggtgataccagtagcattggctatgacagcatccagaatgtaacaaggttggacattgaaactggccgctga

SEQ ID NO: 280 - protein, 733 aa, Arabidopsis thaliana
MKVHSLFLMAIFFYLAYTQLVKAQPRDDCQTRCGDVPIDYPFGISTGCYYPGDDSFNITCEEDKPNVLSNIEVLNFNHSGQLRGLIPRSTVCYDQQTNNDFESLWFRLDNLSFSPNNKFTLVGCNAWALLSTFGIQNYSTGCMSLCDTPPPPNSKCNGVGCCRTEVSIPLDSHRIETQPSRFENMTSVEHFNPCSYAFFVEDGMFNFSSLEDLKDLRNVTRFPVLLDWSIGNQTCEQVVGRNICGGNSTCFDSTRGKGYNCKCLQGFDGNPYLSDGCQDINECTTRIHNCSDTSTCENTLGSFHCQCPSGSDLNTTTMSCIDTPKEEPKYLGWTTVLLGTTIGFLIILLTISYIQQKMRHRKNTELRQQFFEQNGGGMLIQRLSGAGPSNVDVKIFTEEGMKEATDGYNESRILGQGGQGTVYKGILQDNSIVAIKKARLGDRSQVEQFINEVLVLSQINHRNVVKLLGCCLETEVPLLVYEFISSGTLFDHLHGSMFDSSLTWEHRLRIAIEVAGTLAYLHSYASIPIIHRDVKTANILLDENLTAKVADFGASRLIPMDQEQLTTMVQGTLGYLDPEYYNTGLLNEKSDVYSFGVVLMELLSGEKALCFERPQSSKHLVSYFVSAMKENRLHEIIDGQVMNEYNQREIQESARIAVECTRIMGEERPSMKEVAAELEALRVKTTKHQWSDQYPKEVEHLLGVQILSTQGDTSSIGYDSIQNVTRLDIETGR

SEQ ID NO: 281 - DNA, 2193 bp, Arabidopsis thaliana
atgaagacaaagactagcatcttccaatttattgtagcatctgtccttactctgctcatcaatgactcatcagcagcaacacctccacctccaattagcaattcttcaacgtcttgtaacaaaacctgtggaggaatctcgatcccgttcccattcggaattggcgggaaagattgttatctcaacggttggtacgaggttatctgcaacacaaccacttccgattctaacacaactgttcctttactctctatgatcaatcgggaagtggtgaatatctctctcccagacagtaacgaaccatacggacttgttcaaatcaaaggtcctgtgacatcgttgggttgttctagtaatactagtgaaggaccccaaaactcgctcccggttttgaatgtcacaggtaagggcagcccatatttcctgaccgacgagaaccgtcttgtggcggttggttgtggtataaaggcattgatgacagatacagaatcagagatcttgggttgtgaatcgagctgcgaacacagaaagagtggtgaagaagtaacaaatttgatctgtactggttacagatgctgccaggcgaggctaccggtggggcgtcctcaggctataaccgtaaatatagagaactctagtggaggagaagaaacgtgcaaagttgcgttcttgacggacaagaggtattcgccgtctaatgttacagagccagaacagtttcataacaatggatatgtggtgctagagttaggatggtactttgccacttcgaactctcgctttaagagcctcttgggttgtacaaatatgagccgaaaaggttctgggttctcggatgataattgcagttgcgagtatgattacttctccgggatgagttataggaattgttattgcgactatggctacacagggaacccataccttcgaggtggctgcgtagatactgattcatgcgaaggaaatcacaactgtggggaagatgctcattgtgttaacatgcctggaccaatgtccatgtgcaggcctaaccccaagataaccaaacctaccaaacccccggtgcttcaaggcattcttataggtttgtcaggattagtattttttgttgggctattctggctatttaaactcataaagaagcgaaggaacatcaaccgcagcaagaagtttttcaaacggaacggaggcttgctgttgaaacaacaattaactacaaaggacggaaatgtagaaatgtctaagattttcagttcaaaggagttaagaaaagccactgataacttcagcatagatagagtgcttgggcaaggcggtcaaggcactgtgtacaaaggaatgttggtagatgggagcatcgttgcggttaaaagatccaaagttgtggatgaagacaaaatggaagagtttatcaatgagattgttcttctgtcacaaatcaatcaccgcaacattgtgaaactcttgggatgttgcttggagacagaagttccaatcttggtgtacgaatatattcccaatggagatctgttcaagcggcttcatgatgaatctgatgattacaccatgacttgggaagtgcggcttcgcatagccatagagatagcaggagctcttacatacatgcactcagctgcaagttttccaatattccatagagatattaagactaccaatatcctactggacgagaaataccgagccaaagtgtctgactttggaacttcaagatcagtaaccttagatcaaactcacttgacaacattagttgcaggaacttttggttacatggatccagagtacttcttgtcaagccaatacactcacaagagcgatgtttatagtttcggggtcgtcttggtggagctcataaccggagaaaaaccattgtcccgtgtccggtctgaagaaggtagaggcttggcaactcatttcctcgaggccatgaaagagaacagagtgattgacataattgatattcggatcaaagacgaaagcaaactggagcaagtaatggcggtagcaaaactcgccagaaaatgtcttaaccggaaagggaagaaccggccaaacatgaaagaggtttcaaatgagctagagaggatccgttcatcacccgaagatttagatgtccgtaccgaaaacgaagacgaagaagaggatcaaccaatggcaatcaacaacaaaagatga

SEQ ID NO: 282 - protein, 730 aa, Arabidopsis thaliana
MKTKTSIFQFIVASVLTLLINDSSAATPPPPISNSSTSCNKTCGGISIPFPFGIGGKDCYLNGWYEVICNTTTSDSNTTVPLLSMINREVVNISLPDSNEPYGLVQIKGPVTSLGCSSNTSEGPQNSLPVLNVTGKGSPYFLTDENRLVAVGCGIKALMTDTESEILGCESSCEHRKSGEEVTNLICTGYRCCQARLPVGRPQAITVNIENSSGGEETCKVAFLTDKRYSPSNVTEPEQFHNNGYVVLELGWYFATSNSRFKSLLGCTNMSRKGSGFSDDNCSCEYDYFSGMSYRNCYCDYGYTGNPYLRGGCVDTDSCEGNHNCGEDAHCVNMPGPMSMCRPNPKITKPTKPPVLQGILIGLSGLVFFVGLFWLFKLIKKRRNINRSKKFFKRNGGLLLKQQLTTKDGNVEMSKIFSSKELRKATDNFSIDRVLGQGGQGTVYKGMLVDGSIVAVKRSKVVDEDKMEEFINEIVLLSQINHRNIVKLLGCCLETEVPILVYEYIPNGDLFKRLHDESDDYTMTWEVRLRIAIEIAGALTYMHSAASFPIFHRDIKTTNILLDEKYRAKVSDFGTSRSVTLDQTHLTTLVAGTFGYMDPEYFLSSQYTHKSDVYSFGVVLVELITGEKPLSRVRSEEGRGLATHFLEAMKENRVIDIIDIRIKDESKLEQVMAVAKLARKCLNRKGKNRPNMKEVSNELERIRSSPEDLDVRTENEDEEEDQPMAINNKR

SEQ ID NO: 283 - DNA, 2555 bp, Arabidopsis thaliana
acgcatcatccatcttatctcatttctgacattttcgtctatgcagagtcttgatttttgttttctcccttcattaaacaacattactagaatcaaaagatcagatagagctggcaagttgagagaacaagaacaagatcagtatgaagacagagactcacaaccgtcaatgcattccactagcgatctctgtcctatctctgttcatcaatggcgtctcatcagcaagacaacctccagatcggtgtaacagagtctgcggagaaatatcaattcctttcccgtttggcatcggtgggaaagattgctatctaaacccgtggtacgaggttgtctgtaacagcacaaactctgttccgttcctctcaaggatcaacagagaattggtgaacatctctctcaatggagttgtccacatcaaagctcccgtaacttcctccggctgttctacaggaacatctcagccacttacaccgccgcctttaaacgttgctggccaaggcagcccctatttcctcacggacaagaacctactcgtggcggttggttgcaaattcaaggctgttatggcgggtattacatcgcagatcaccagttgtgagtcgagttgtaacgagagaaacagtagcagccaagaaggaagaaacaaaatctgcaatggttataaatgttgccagacgaggataccagaagggcagccgcaagtaatcagtgtggatatagagatccctcaaggtaacaacacaacaggagaaggaggatgcagagttgcgtttttgacgagcgacaagtattcaagtttaaatgttacagagccagaaaagtttcatggtcatggatacgcggcggtcgagcttggatggttctttgatacttccgattctcgtgatacacaacccataagttgtaaaaatgcgtcagatacaacaccgtacacttccgatacgaggtgtagttgctcatacggctacttttctggattcagctatagggactgctactgtaactccccaggttataaagggaatccgttccttccaggtggttgtgtagacgtggatgaatgtaaactagatataggacgcaaccagtgtaaagatcaaagctgtgtgaatctgcccggttggtttgactgccagcccaagaaaccagagcagctcaagcgggtgattcaaggtgttcttataggttcagcactgttgcttttcgccttcggaatcttcgggttgtacaagttcgtacagaagcggaggaaactaatccgaatgaggaagttcttcagacgtaatggaggtatgttgttaaaacaacagttagctagaaaagaaggcaatgtagagatgtcaagaatattcagctcacatgagttggagaaagctactgataacttcaacaagaatagggttcttgggcaaggaggtcaaggtacagtgtataagggaatgctcgttgatggtagaatcgtcgcagtaaaaaggtcgaaagctgtggatgaagatagggtagaagagttcatcaatgaagttgttgttcttgcgcagatcaatcatagaaatattgttaaacttttggggtgttgtcttgaaacggaagttccagtcttagtttatgagtttgttccaaatggagacttatgcaagcgtcttcatgatgaatctgatgattacacaatgacatgggaggtgcgtcttcacattgctatagagattgcaggagcactttcttatttgcattctgctgcatctttccccatatatcatagagatatcaagactactaatatactcttagatgagagaaaccgagctaaggtgtcggatttcggaacttcaagatcagtaactatagatcaaactcacttgacaactcaagttgcaggcacttttggatatgtggatccagagtactttcaatcaagcaagtttacggaaaaaagtgatgtttatagttttggagttgtccttgtggagctcttaaccggagaaaaaccttcctcccgtgtccggtctgaagaaaacaggggccttgcagctcactttgtcgaagccgtgaaagagaacagagtgcttgacatagttgatgatcggatcaaagatgaatgcaacatggaccaagtaatgtcagtggcaaatctagctagaaggtgtttaaaccgaaaagggaagaagaggccaaacatgagagaggtttcaattgagctggagatgattcgttcatcacattatgattcaggaattcatatagaggacgacgatgaggaagatgatcaagccatggaactcaactttaacgacacttgggaggttggtgcgactgctccagcctccatgtttaacaatgcatcccccacgtctgatgctgagcctctggtgcctttacgaacatggtaatgatcaactcaaaacactgcatatgtatactctcatctgatgtaaactttcgataatgaatatttggttttcaccatgtaatataacacacaaattgcattatattttcaagaagaaaaataatgttttagtacaagaacaataaatggggcttcaaccttcacc

SEQ ID NO: 284 - protein, 748 aa, Arabidopsis thaliana
MKTETHNRQCIPLAISVLSLFINGVSSARQPPDRCNRVCGEISIPFPFGIGGKDCYLNPWYEVVCNSTNSVPFLSRINRELVNISLNGVVHIKAPVTSSGCSTGTSQPLTPPPLNVAGQGSPYFLTDKNLLVAVGCKFKAVMAGITSQITSCESSCNERNSSSQEGRNKICNGYKCCQTRIPEGQPQVISVDIEIPQGNNTTGEGGCRVAFLTSDKYSSLNVTEPEKFHGHGYAAVELGWFFDTSDSRDTQPISCKNASDTTPYTSDTRCSCSYGYFSGFSYRDCYCNSPGYKGNPFLPGGCVDVDECKLDIGRNQCKDQSCVNLPGWFDCQPKKPEQLKRVIQGVLIGSALLLFAFGIFGLYKFVQKRRKLIRMRKFFRRNGGMLLKQQLARKEGNVEMSRIFSSHELEKATDNFNKNRVLGQGGQGTVYKGMLVDGRIVAVKRSKAVDEDRVEEFINEVVVLAQINHRNIVKLLGCCLETEVPVLVYEFVPNGDLCKRLHDESDDYTMTWEVRLHIAIEIAGALSYLHSAASFPIYHRDIKTTNILLDERNRAKVSDFGTSRSVTIDQTHLTTQVAGTFGYVDPEYFQSSKFTEKSDVYSFGVVLVELLTGEKPSSRVRSEENRGLAAHFVEAVKENRVLDIVDDRIKDECNMDQVMSVANLARRCLNRKGKKRPNMREVSIELEMIRSSHYDSGIHIEDDDEEDDQAMELNFNDTWEVGATAPASMFNNASPTSDAEPLVPLRTW

SEQ ID NO: 285 - DNA, 2340 bp, Arabidopsis thaliana
atgaagaaagaaactcaaaacctccaatgtatcccactagtgatctctgtcttatctctgtttggcgtctcatcagcaagaaaacctccatatctgtgtaacagagtctgcggaggaatatcaattcctttccctttcggtatcggtggaaaagaatgctatctaaacccgtggtacgaggttgtatgtaacaccacaacctctgttccgttcctctcgaggatcaacagagaattggtgaacatctatcttccagatcctactgagtactactctaacggagttgttcacatcaaaggtcccgtaacttcctcagggtgttctaccggaacatctcaaccacttacaccgcagcctttaaacgttgcaggccaaggcagtccctatttcctcacggacaagaacctcctcatggccgttggttgcaacgtcaaggccgttatgatggatgtcaaatcgcagatcatcggttgcgagtcaagttgcgacgagagaaacagtagcagccaagttgtaagaaacaaaatctgcagtggtaataaatgttgccagacgaggataccggaagggcagccgcaagtaattggagtcaacatagagatccctgaaaacaaaaacacaacagaaggaggatgcaaagttgcatttttgacgagcaacaaatattcgagtttgaatgttacagagccagaagagtttcatagtgatggatacgcggtggttgagcttggatggtactttgatacttcggattctcgtgttttaagccccataggttgtatgaatgtgtcagatgcatcacaagatggcgggtatggttccgagacgatttgcgtttgctcgtacggctacttctctggattcagctataggagttgctattgtaactccatgggttacgcagggaatccattccttccaggtggatgtgtagacatagatgaatgtaaactagaaataggacgcaaaaggtgcaaagaccaaagttgtgtgaataagcccggttggtttacgtgtgagccaaagaaaccagggcagatcaagccagtgttccaaggtaaaagtcaatttgattttatcttgaatgttgtgttgaagatattattgttttgtgttcttataggttcggcactgttgcttttcgcctttggaattttcgggttgtacaagttcatcaagaagcagaggaggagcagtcgaatgagagtgttcttcaggcgtaatggagggatgctgttaaaacaacagttagctagaaaagaaggcaatgtagagatgtcaaagatatttagctcgaacgagttggagaaagctactgataactttaacacgaatagggttcttgggcaaggaggtcaaggtactgtttacaaaggtatgctcgttgatggtagaatcgtcgcagtgaaaaggtcgaaagccatggatgaagacaaggtagaagagtttatcaatgaagttgttgttctagcgcagatcaaccatagaaacattgttaaactcttgggatgttgccttgagacggaagttccagtcctggtttatgagtttgttccgaacggtgacttatgcaagcgtcttcgagatgaatgtgatgattacatcatgacatgggaagtgcgccttcacattgcaatagagattgcaggagcactttcgtacctacactcggctgcatcttttcctatataccacagagatatcaagactaccaacatactactggatgagaaatatcaggttaaggtgtctgatttcggaacttcaagatcggtgaccatagatcaaactcacttgacaactcaagttgcaggtacttttgggtacgtggatccagagtactttcaatcaagtaagtttacggataaaagtgatgtgtacagttttggagttgtcctcgtggagctcattaccggaaaaaacccgtcctcccgtgtccagtctgaagaaaacaggggatttgcagctcattttgttgcagccgtgaaagagaacagatttcttgacatagttgatgaacggatcaaagatgaatgcaacctggaccaagtgatggcagtggcaaaactcgctaaaagatgtttaaaccgaaaagggaagaagaggccaaacatgagagaagtttcagttgagctggagaggattcgttcatcatcttataagtcagagattcataatgatgatgatgatgatgatgatgatgatgatgaggatgatcaagccatggaactcaacattgaagagacttgggatgttggtatgactgctccagcctctatgtttaataacggatcccctgcgtctgatgttgagcctctggttcctctacgaacatggtag

SEQ ID NO: 286 - protein, 779 aa, Arabidopsis thaliana
MKKETQNLQCIPLVISVLSLFGVSSARKPPYLCNRVCGGISIPFPFGIGGKECYLNPWYEVVCNTTTSVPFLSRINRELVNIYLPDPTEYYSNGVVHIKGPVTSSGCSTGTSQPLTPQPLNVAGQGSPYFLTDKNLLMAVGCNVKAVMMDVKSQIIGCESSCDERNSSSQVVRNKICSGNKCCQTRIPEGQPQVIGVNIEIPENKNTTEGGCKVAFLTSNKYSSLNVTEPEEFHSDGYAVVELGWYFDTSDSRVLSPIGCMNVSDASQDGGYGSETICVCSYGYFSGFSYRSCYCNSMGYAGNPFLPGGCVDIDECKLEIGRKRCKDQSCVNKPGWFTCEPKKPGQIKPVFQGKSQFDFILNVVLKILLFCVLIGSALLLFAFGIFGLYKFIKKQRRSSRMRVFFRRNGGMLLKQQLARKEGNVEMSKIFSSNELEKATDNFNTNRVLGQGGQGTVYKGMLVDGRIVAVKRSKAMDEDKVEEFINEVVVLAQINHRNIVKLLGCCLETEVPVLVYEFVPNGDLCKRLRDECDDYIMTWEVRLHIAIEIAGALSYLHSAASFPIYHRDIKTTNILLDEKYQVKVSDFGTSRSVTIDQTHLTTQVAGTFGYVDPEYFQSSKFTDKSDVYSFGVVLVELITGKNPSSRVQSEENRGFAAHFVAAVKENRFLDIVDERIKDECNLDQVMAVAKLAKRCLNRKGKKRPNMREVSVELERIRSSSYKSEIHNDDDDDDDDDDEDDQAMELNIEETWDVGMTAPASMFNNGSPASDVEPLVPLRTW

SEQ ID NO: 287 - DNA, 2136 bp, Arabidopsis thaliana
atgaatggctcatcagcagcaacaccaccgccacctccaaacagtaagaattcttcaacttcgtgtaacagaacctgtggaggaatctcgattccgttcccatttggaatcggtgggaaggattgttatctcaacggttggtacgaggttgtctgcaacgccaccacttccgggtcgtccggcacaactgttccattcctgtcgagaatcaacagggaagtggtgaacatctctcttccagaaggtaataatgaacaatacggagtggttcacatcaaaggtcctgtgacttcgttaggttgttcaagtaatactagtcaagtaccccaaaagtcgctaccggatttaaacgtcacgggcaagggcagcccatatttcatcaccgacgagaaccgcctcgtggctgtgggttgcggtactaaggcgttgatgacggatatagaatcagagatcttgggttgtgaatctagctgcaaagatagcaagagtagtcaagaagtaacaaacttgttatgtgacggttacaaatgttgccaggcgaggataccggtggaacgtccacaagcagtaggtgtcaatatagagagctcaggaggagatggatgcaaggttgccttcttgtctagcaagaggtattccccgtcaaatgttactataccagaacagttccatgctggtggctacgtggtggtagagctaggttggtactttgctactacggattcacgctttaggaaccccttgggttgtataaatctgacatattcgggatcttacttatccggtgatagttgcctttgcgagtatggttacttttccgaaatgagttataggaactgctattgctcccttggcttcacagggaatccataccttagaggaggttgcattgacaatgatgattgcaaaggacctaatatctgtgaagaaggcacttgtgtgaacgtgcctggaggctatagatgcgatcccaagcccaagataatcaagccggccaaacccctcgtgctacaaggggttcttttaggtttaatgggactattgttcttagttgttgggacgcttgggttgattatatttataaaaaagagaaggaggatcatcagtagcaggaagttcttcaaacgtaatggaggcttgttgttaaaacaacaactaactactacaaatgacggtaatgtagacatgtcaaggctatttagctcagaagagttgaagaaagccaccgataactttagcgtgaagagggtgcttgggaaaggcagtcaaggaactgtgtataaggggatgatggtggatggcaagatcattgcggttaaaagatcaaaagttgtcgatgaagataagctcgaaaagttcatcaatgagatcatccttctttcacagattaaccataggaatattgtgaaactaataggatgttgcttggaaacagaggttccgatcttggtttacgaatatattcccaatggagatatgttcaagcgccttcatgatgaatccgacgattatgcgatgacttgggaagtgcgtcttcgcatagccatagagatcgcgggagctctaacatacatgcactcagctgcatcatttccaatataccacagagatatcaagactaccaatatcctattggatgaaaaatacggagctaaggtttctgatttcggaacatcaagatcggtaaccattgatcaaactcacctgacaacaatggttgcaggaacttttgggtacatggatccagagtacttcctatcaagccaatatactgacaagagcgatgtttatagtttcggggttgtcctggtagagctcataactggagaaaaaccgttgtcccgaattcgttctgaggaaggaagggggttggcaactcatttcctcgaggccatgaaagaaaacagagtgattgacatcattgatattcggatcaaagaagaaagcaagcttgaccaactgatggcagtggcgaaactcgctcgaaagtgtcttagccggaaagggattaaaagaccaaacatgagagaggcttcactcgagctggagaggatccgttcatcacctgaagatttagaggcccatattgaaaatgatgatgaagaggaccaagtcatggagatcagcagagaatga

SEQ ID NO: 288 - protein, 711 aa, Arabidopsis thaliana
MNGSSAATPPPPPNSKNSSTSCNRTCGGISIPFPFGIGGKDCYLNGWYEVVCNATTSGSSGTTVPFLSRINREVVNISLPEGNNEQYGVVHIKGPVTSLGCSSNTSQVPQKSLPDLNVTGKGSPYFITDENRLVAVGCGTKALMTDIESEILGCESSCKDSKSSQEVTNLLCDGYKCCQARIPVERPQAVGVNIESSGGDGCKVAFLSSKRYSPSNVTIPEQFHAGGYVVVELGWYFATTDSRFRNPLGCINLTYSGSYLSGDSCLCEYGYFSEMSYRNCYCSLGFTGNPYLRGGCIDNDDCKGPNICEEGTCVNVPGGYRCDPKPKIIKPAKPLVLQGVLLGLMGLLFLVVGTLGLIIFIKKRRRIISSRKFFKRNGGLLLKQQLTTTNDGNVDMSRLFSSEELKKATDNFSVKRVLGKGSQGTVYKGMMVDGKIIAVKRSKVVDEDKLEKFINEIILLSQINHRNIVKLIGCCLETEVPILVYEYIPNGDMFKRLHDESDDYAMTWEVRLRIAIEIAGALTYMHSAASFPIYHRDIKTTNILLDEKYGAKVSDFGTSRSVTIDQTHLTTMVAGTFGYMDPEYFLSSQYTDKSDVYSFGVVLVELITGEKPLSRIRSEEGRGLATHFLEAMKENRVIDIIDIRIKEESKLDQLMAVAKLARKCLSRKGIKRPNMREASLELERIRSSPEDLEAHIENDDEEDQVMEISRE

SEQ ID NO: 289 - DNA, 2358 bp, Arabidopsis thaliana
gcagaagtatgaagaagactaagacttaccaagtcttctgtattgctgcactctctgtcctaactctgcagcttatcaatggttcatcagcagcaacacctccacctccaaatagtaattcttcaacttcttgtaacagagcctgtggaggagtctcaattccgttcccgttcggaatcgggaaggattgttatctcaatggctggtatgaggttatctgcaacacttccacttccgggtcgtctggcacaacggttccgttcctctcacggatcaatagcgaagtggtgaacatctctcttccagatggtaagaaactatatggagtagttcacatcaaaggtccagtgacatcgttgggttgctctagtagtagtagtagcagtcaagtatccgaaatgtcattgccgaatttgaacgtcacaggcaggggaagtccatatttcctcactgatgagaactgcctcgtgatggttggttgtggtacaaaggctttgatgaaggatatagaatcagagatcttgggttgtgaatcgagctgtgaagatagcaagagtagtgaagaagtaacaaactcgaaatgtgacggttacaaatgctgccaggcgagaataccgttggagcgtcctcaggttattggtatcaatatagaaaacactagtgccacaagagggaaagaagggtgtagtgttgcgttcttgactaacaaaaggtatgcgccgatgaatgttaccgagccagaacaattccatgctggtggctacgcagtggttgagctaggttggtactttgatacatcggattcacgctataggaaccccttaggttgtagaaacatgacgcggtacagttcttacagctcctttgataaatgtagttgtgagtatgattacttttctgggatgagttataggatttgctattgcaactatggctacacagggaacccataccttcgacatggctgcatagacatagacgaatgtgaaggacaccacaattgtggagaagggacttgtgtgaacatgcctggaacacatagctgcgagcccaagataacgaaaccggaaaaagcctctgtgcttcaaggtgttcttataagtctaggagtgctgcttttcgtccttggaatcttggggttgtacaaattcattaagaagcgaacgaggatcatccgcaacaaaaactttttcaaacgtaatggtggcttgctgttgaaacaacaactaattacaaagaacggaaatgttgatatgtcaaggatatttagctcaaaagagttgaagaaagctactgataacttcagcatgaacagggtgcttgggcaagggggtcaaggaactgtgtacaagggaatgttggcggaagggagaatcgttgcggttaaaagatcgaaagttgtgggtgaaggcaagatggaagagttcatcaatgaagtcgtacttctctcacaaattaaccataggaacattgtgaaactcttgggatgttgtctagagactgaagttcctgtcttggtttacgaatatattcctaatggagatctgttcaagcgtcttcatgaaaaatctgaatccaatgattacacgatgacttgggaagtacgtcttcgtatagctatagagatagcgggagctctttcatacatgcactcagctgcatcgattccaatataccacagagatatcaagactaccaatatactattagatgaaaaatatagagccaaagtatctgatttcggaacttcaagatccataaccattgctcaaactcatctaacaacgttagttgcaggcacttttgggtatatggatccggagtactttttatcaagccaatatactgacaagagcgatgtttacagtttcggggtggtcttggtggagctcataaccggagaaaaaccactgtcaaggaagaggattggcaactgatttccttgaggccatgaaagagaacagagtgattgacacaattgatattcggatcaaaggagaaagcaagctgtgccaagtgatggcagtcgcaaaactcgctcgaaagtgtcttagcaggaaagggagaaagcggccaaacatgagagaggtttcatttgagctggagaggatccgttcttcatcacctgaagatttagaggtccatgttagaaatgttgatgcagaggaacaaatcatggaaatcaacagagaacgattttgagggtatgtacatgagtgacaagatccattctttatgttaaactagaagttgcccacaaatatgcctttaattgctttcaaaatacgaattaaatacgatgataacttgtagttaaagtctcaacttgatatgtttatagataataaaattttagtg

SEQ ID NO: 290 - protein, 642 aa, Arabidopsis thaliana
MKKTKTYQVFCIAALSVLTLQLINGSSAATPPPPNSNSSTSCNRACGGVSIPFPFGIGKDCYLNGWYEVICNTSTSGSSGTTVPFLSRINSEVVNISLPDGKKLYGVVHIKGPVTSLGCSSSSSSSQVSEMSLPNLNVTGRGSPYFLTDENCLVMVGCGTKALMKDIESEILGCESSCEDSKSSEEVTNSKCDGYKCCQARIPLERPQVIGINIENTSATRGKEGCSVAFLTNKRYAPMNVTEPEQFHAGGYAVVELGWYFDTSDSRYRNPLGCRNMTRYSSYSSFDKCSCEYDYFSGMSYRICYCNYGYTGNPYLRHGCIDIDECEGHHNCGEGTCVNMPGTHSCEPKITKPEKASVLQGVLISLGVLLFVLGILGLYKFIKKRTRIIRNKNFFKRNGGLLLKQQLITKNGNVDMSRIFSSKELKKATDNFSMNRVLGQGGQGTVYKGMLAEGRIVAVKRSKVVGEGKMEEFINEVVLLSQINHRNIVKLLGCCLETEVPVLVYEYIPNGDLFKRLHEKSESNDYTMTWEVRLRIAIEIAGALSYMHSAASIPIYHRDIKTTNILLDEKYRAKVSDFGTSRSITIAQTHLTTLVAGTFGYMDPEYFLSSQYTDKSDVYSFGVVLVELITGEKPLSRKRIGN

SEQ ID NO: 291 - DNA, 1310 bp, Arabidopsis thaliana
atgagcagagagaagttttccatatataacttgctctctcttctggttctgctgatccatggtttgattgcagcatctgctcaagatctcactgtcttcagttcttgtcaaagccattgcgggggaatagcgattccttatccctttggaattggtaaagattgctatctcaacaacaatgagtggtatgaagttatctgtaaccgaacctcaggaaaccctctgccagttcttaagagtatcaacagagaactggtgaatatctctctcccggacgactcaagcgatgtctttgggctaacccgaatcaagaatccggtaacttctttaggctgttccaatatggaagaaatcagcttggctttgaatgtgaccgggagcccattcttcctcaccggccgtaatactttagtagcagttggctgtaacaacaatgcctcgatgactgatgataagctgcagattggaggatgcgagtctacctgcgacgtggggtttggtcagagaggacggaacagaagctgcaacggctatagatgttgccaagcgaagatactctctgaccgtctgcaacagattggcatcaagatagagagtcttgatgacgaggcatattctcctttaaatataaccgaaccagctttgttttacgataagggatatggaacggtggagttaggttggttcatagataggttacacaatatgtccgttgtactggggtttgctattcaattaccgagggtacaagcggttggagttacaagcgaagctatagaagctgcaggtgtaacagtggctacagaggcaatccatatctctcgagtggatgtacagatattgatgagtgtgaagaagccaaagctgaaggaagcaaccattgtgggaaagggtatgattgtgagaatatcccaggaaactttaggtgtaaatccaacaaaaacaaaagactagccatcattcttggtattagtctaggctttggcttgttggtagccattggagcatggtggttgtataagtttatcagaaagcaaagggagataaagcggaagaagttctctaagcttaatggaggactattgatgcaacaacaattggtttctaacgaaggcaacattgagaatacaagagtattcagctcgaaagaattggagagagccacagaaaacaagagtattgcaacatagaagatccttggaacgtttgtactgattcttcctccaacatcaccaccacatcttcatttggtcgaaacattgtgaccatcagagaccactagatgtaaccgtatcatttgaaattttggt

SEQ ID NO: 292 - protein, 317 aa, Arabidopsis thaliana
MSREKFSIYNLLSLLVLLIHGLIAASAQDLTVFSSCQSHCGGIAIPYPFGIGKDCYLNNNEWYEVICNRTSGNPLPVLKSINRELVNISLPDDSSDVFGLTRIKNPVTSLGCSNMEEISLALNVTGSPFFLTGRNTLVAVGCNNNASMTDDKLQIGGCESTCDVGFGQRGRNRSCNGYRCCQAKILSDRLQQIGIKIESLDDEAYSPLNITEPALFYDKGYGTVELGWFIDRLHNMSVVLGFAIQLPRVQAVGVTSEAIEAAGVTVATEAIHISRVDVQILMSVKKPKLKEATIVGKGMIVRISQETLGVNPTKTKD

SEQ ID NO: 293 - DNA, 2549 bp, Arabidopsis thaliana
agatcataaacagaaaacattaatatgagctctaattgtagttgttctcttttgagtctcttctctctccttctgatcattgatctcaccgttgctagctcttgtcctaagacatgtggaggaatcgacatcccgtacccgtttggaatcggaacgggttgctatctcgagaaatggtacgagattatttgtgtcaacaactctgttccttttctttccatcattaacagggaagttgtgagtatctctttttcggatatgtatcgccggttctttaacgtaggctacgggtcaattcgcataagaaacccaatagcttcaaagggatgctcaagtggcggacaagagtttggatcacttttaaatatgacaggttaccctttttaccttggcgacaacaatatgctcatagcggttggctgcaacaacacggcgtcgttgacaaatgtcgagccaagtattgtgggatgcgagtctacttgcagcacaaatcaagatatacctataaatgattatctcggggtactctactgtaatgctaggtatggcgattccgagtattgtaaaaatatttccattatgaatgatacaagctgcaacggtattggatgctgcaaggcaagtttgcccgctaggtatcaacagattattggtgtggaaatagatgatagtaacacagaatccaagggatgcaaagttgccttcataacagacgaggaatactttttgtcaaatggatctgacccggagaggcttcatgctaatggatatgatacggttgacctaagatggttcatccatacggcgaatcattccttcataggctctctaggatgcaaaagtatagacgagtacacaattctaagaagagacaatcgtgaatacggaataggttgcctttgcgactataactctacaactacaggctatgcaacatgttcatgcgctagtggtttcgaaggcaacccatatattcctggcgaatgcaaagatattaatgaatgcgtaagaggcattgatggaaacccagtctgtacggcaggcaagtgtgtcaatttgctgggcggttatacgtgtgagtacacaaatcatcgaccacttgttatagggcttagcactagtttcagcacattggtattcattggtggaatatactggttatacaaatttattagaagacaaaggaggttaaaccaaaagaagaaattctttaagcgtaatgggggtttattgttgcaacaacaattgactacaactgaaggcaacgtggacagtacaagagtgttcaactcaagagagttggagaaagccaccgaaaactttagcttaaccagaatactaggcgaaggaggtcaaggtacagtgtacaagggaatgcttgtagacggtagaatagtagcagtaaagaagtccaaagtcgtagacgaagacaagctagaagagttcatcaacgaagtcgtcattctctcacaaatcaaccataggaacatcgtaaaactcttggggtgttgcctagagacagatgtccctattctagtctacgaattcattcctaatggtaacctttttgagcatcttcatgatgattccgatgattatacgatgactacttgggaagtgcgtcttcgtattgctgtagatattgcaggagcgctttcatatttgcactcggctgcatcatctccaatctatcacagagacatcaagtctacaaacataatgttagatgagaaacatcgagccaaagtgtccgattttggtacttcaagaacggtgaccgtggatcatacccacctcactacagtagtttcaggcacggtgggatatatggatccagagtatttccagtcgagccaattcacagacaaaagtgatgtttatagctttggagtcgtgctagcggagctaatcactggagaaaaatcagtctcttttctgcgatctcaggaatataggacattggcaacttatttcactcttgcaatgaaagagaacagactctccgacattattgatgctcgaataagagatggttgtaagttgaatcaagtgacagcagccgcaaaaattgcaaggaaatgtttgaatatgaagggaaggaaacgaccaagtatgagacaagtatcgatggaattggagaagattcgttcatattctgaagatatgcagccgtatgagtatgctagcgaaaacgaagaagaaaaaaaagaaacattagtggacgttaacgtagagtcgagaaactacgtgagtgttaccgccgcatcatctcaatacagcattgctacaacatcttcgtcgcggtcagatgttgaaccattgtttcctcggtaatatattaaccatgcatgcaaacaaatttattactacctcatatctttgcatttacgttctgttttggtctttacgtgtgaagttatttctataaatgtcgtcactcgtcaatttgtgttattaaccatacagatctgtttgtaaccactttgtagtttgtactttgtactatacacttcccaatacataagaataatttcatagtttacttcttt

SEQ ID NO: 294 - protein, 769 aa, Arabidopsis thaliana
MSSNCSCSLLSLFSLLLIIDLTVASSCPKTCGGIDIPYPFGIGTGCYLEKWYEIICVNNSVPFLSIINREVVSISFSDMYRRFFNVGYGSIRIRNPIASKGCSSGGQEFGSLLNMTGYPFYLGDNNMLIAVGCNNTASLTNVEPSIVGCESTCSTNQDIPINDYLGVLYCNARYGDSEYCKNISIMNDTSCNGIGCCKASLPARYQQIIGVEIDDSNTESKGCKVAFITDEEYFLSNGSDPERLHANGYDTVDLRWFIHTANHSFIGSLGCKSIDEYTILRRDNREYGIGCLCDYNSTTTGYATCSCASGFEGNPYIPGECKDINECVRGIDGNPVCTAGKCVNLLGGYTCEYTNHRPLVIGLSTSFSTLVFIGGIYWLYKFIRRQRRLNQKKKFFKRNGGLLLQQQLTTTEGNVDSTRVFNSRELEKATENFSLTRILGEGGQGTVYKGMLVDGRIVAVKKSKVVDEDKLEEFINEVVILSQINHRNIVKLLGCCLETDVPILVYEFIPNGNLFEHLHDDSDDYTMTTWEVRLRIAVDIAGALSYLHSAASSPIYHRDIKSTNIMLDEKHRAKVSDFGTSRTVTVDHTHLTTVVSGTVGYMDPEYFQSSQFTDKSDVYSFGVVLAELITGEKSVSFLRSQEYRTLATYFTLAMKENRLSDIIDARIRDGCKLNQVTAAAKIARKCLNMKGRKRPSMRQVSMELEKIRSYSEDMQPYEYASENEEEKKETLVDVNVESRNYVSVTAASSQYSIATTSSSRSDVEPLFPR

SEQ ID NO: 295 - DNA, 1674 bp, Arabidopsis thaliana
atgaagttgcagcacgttgtgtacctggtggctattttcttcgtggtggctattttcgtgattgcatgtatagaagagaataagtacttagtctggattatgattattcttgcaaacaccaccaacattttgagcctcgtgcgtagcattagctatataaaaaatataaggaagcaccagaaggacaccaagatccaacgacaattattctttgagaaaaatggcggtggcatgttgatagagcgactctcgggggcagggtcatcaaacattgatttcaaaatctttacggaggaagacatgaaggaagcaactaatggttatgatgtgagcagaatcttgggtcaaggaggccaatggacagtctacaaagggatattgcctgacaactccatcgttgctataaagaaaactcggctaggagacaacaaccaagtagagcagttcatcaacgaagtgctcgtgctttcacaaattaaccacaggaacgttgtcaagctcttgggttgctgtctagagactgaagttcccttgttggtctatgaattcattaccggtggctcccttttcgatcacttgcacggttccatgtttgtttcttctcttacatgggaacaccgcctggagatagcaatagaagttgctggagctatagcgtatcttcactccggtgcttctattccaatcatccatcgcgatatcaaaactgaaaatattctcttggatgaaaacttaactgcaaaagtagctgactttggcgcttcaaagttgaagccaatggataaagaacagctcaccactatggtgcaaggcactctcggatatttagacccagaatactataccacatggcttctgaacgaaaagagcgatgtttatagctttggggtagtcctcatggaactgatatcaggtcaaaaggcattgtgctttgaaaggccagagacttcaaaacatttggtgagttactttgttttggccacgaaagagaataggttgcatgagattattgacgaccaagtgttgaacgaggaaaaccagagggaaatccatgaagctgcaagagttgctgttgaatgtacaagactaaagggagaggaaaggccaaggatgatagaagtagctgcagagctagaaacgttgagagccaaaacgaccaaacataattggttggatcagtatcctgaagagaatgtacacttgcttggtagtaacatcgtgtcagcacaaggccataccagtagccgtggttatgacaacaacaagaatgtagcaaggtttgacattgaagctggccgctgataaagacgaagaagaagattgttttcgtccaacgagtccaggaagaggttgtggcatcattggattcactggaacaggaaacttatgagcagaactaaccattgttctttcgtttatcatccctacttctttgcagactctgtctactactccaaggaagtctctaaccaccaagaatattctaaacggatgcgcttcttctttagccgagtttccatggaaatactctgtgatttcttttacaagtgataacgctacgctctcttgagcttgtactctgatgatctcttcctcagctcttttcagaaacgtttccatcgattccgaaaacctctgactgttgctttcttctgtgattgttgattggacttg

SEQ ID NO: 296 - protein, 433 aa, Arabidopsis thaliana
MKLQHVVYLVAIFFVVAIFVIACIEENKYLVWIMIILANTTNILSLVRSISYIKNIRKHQKDTKIQRQLFFEKNGGGMLIERLSGAGSSNIDFKIFTEEDMKEATNGYDVSRILGQGGQWTVYKGILPDNSIVAIKKTRLGDNNQVEQFINEVLVLSQINHRNVVKLLGCCLETEVPLLVYEFITGGSLFDHLHGSMFVSSLTWEHRLEIAIEVAGAIAYLHSGASIPIIHRDIKTENILLDENLTAKVADFGASKLKPMDKEQLTTMVQGTLGYLDPEYYTTWLLNEKSDVYSFGVVLMELISGQKALCFERPETSKHLVSYFVLATKENRLHEIIDDQVLNEENQREIHEAARVAVECTRLKGEERPRMIEVAAELETLRAKTTKHNWLDQYPEENVHLLGSNIVSAQGHTSSRGYDNNKNVARFDIEAGR

SEQ ID NO: 297 - DNA, 2431 bp, Arabidopsis thaliana
agagaaaaaaaaaatgaagagaaggagactttttttctctgttctactctctatcctaactctgttcatcaatggtcctttgataacgacagctcaatctccaccttcttcttcaacttcatgtaaccgtatctgtggaggaatcgagattccttttccttttggaatcggacgaagagactgttttctcaacgactggtacgaggttgtctgtaacagcaccacctccggtaaatccttagctccgttcctctataagatcaacagagaattagttagcatcactcttcgaagcagcatcgacagttcctacggagttgttcacattaaatctccggtgacttcctccggctgttctcaacgacccgtaaagcctcttcctttaaacctcaccggtaaaggaagtccctttttcatcaccgactcgaatcgtctcgtctcagttggttgtgacaacagagcattgattacagacatcgaatctcagatcacaggatgcgaatcgagctgcgacggagataagagtcgtttagacaagatctgcggtggttacacatgttgtcaggcgaagattccggcggatagaccgcaagtaatcggcgttgaccttgaaagctccggtggtaacacaactcaaggaggaaactgtaaagttgctttcttgacgaatgagacttactctccggcgaatgttacagagccggaacaattttatactaatgggtttacggtgattgagcttggttggtactttgatacatcagattctcggttaacgaatcctgtgggttgtgtgaatttgacggaaacagggatttacacgagcgcaccgagctgtgtttgtgagtatggtaacttctctggctttggttacagtaactgttactgcaatcagattggttacagagggaatccttatcttcctggtggatgcattgacattgacgaatgtgaggaaggaaaaggactaagcagctgtggagaactaacttgtgtgaatgttcctggatcgtggaggtgcgagctgaatggagtagggaagatcaagcctctgtttccaggtcttgttctaggttttccactgttgttcttggtacttgggatatggggattgatcaagttcgttaagaagagaaggaagattatccgaaagagaatgttctttaaacgtaatggaggcttgttgttgaaacaacagttaactacaagaggaggtaatgtgcagtcatcgaagatattcagttcgaaagagctggagaaagcgacggataacttcaatatgaacagggttcttgggcaaggaggtcaaggcactgtctacaaaggaatgttggtagatgggcgaattgttgctgtgaaaagatctaaagttttagatgaagataaagttgaggagtttatcaatgaagttggtgttctctcgcagattaaccatagaaatattgtcaaactcatggggtgttgtctcgagacagaggttcctatcttggtttatgaacatattccaaatggagacctattcaagcggcttcaccatgattctgatgattacactatgacttgggatgtgcgattgcgcatctctgttgagattgcaggagcacttgcttacttgcactcggctgcatcaactccggtctatcatagagatgtcaagaccacaaacatacttttggatgagaagtatagagccaaggtatcggatttcgggacctcgagatccataaacgtagatcaaactcacttgactactctagttgcaggtacttttggatacttggatccagagtactttcaaactagccagtttacggataaaagtgatgtttatagttttggggtcgtcttggttgagctcataactggagaaaagccgttttctgtaatgcggcccgaagaaaacagaggacttgtgtctcatttcaatgaggctatgaaacagaacagagttcttgatattgttgattctcggatcaaagaaggttgcacgttggaacaagtgttggctgtggcgaaacttgccagaaggtgtttaagtctaaaagggaagaaacgaccaaatatgagagaggtttcagttgagcttgagaggatccgttcatcacccgaagatttggagttacatattgaagaggaggacgaagaagaatgcgccatggaaatcaacatggatgattcttggagcgtcgacatgactgctccagcttccctctttgatttatcgcccaagttagacgttgaaccgctggttcctcaacgaacatggtgatgatggaacctaaaacactgcaaatgtacaaagtgctgtgataacaaattctctcaatgttccattctttattaataaaaaatttgatgatgtcaaagaaaaaaacttgtattctccaaaacttttagcatatatattcgattacagaagattcatatttgt

SEQ ID NO: 298 - protein, 714 aa, Arabidopsis thaliana
MKRRRLFFSVLLSILTLFINGPLITTAQSPPSSSTSCNRICGGIEIPFPFGIGRRDCFLNDWYEVVCNSTTSGKSLAPFLYKINRELVSITLRSSIDSSYGVVHIKSPVTSSGCSQRPVKPLPLNLTGKGSPFFITDSNRLVSVGCQAKIPADRPQVIGVDLESSGGNTTQGGNCKVAFLTNETYSPANVTEPEQFYTNGFTVIELGWYFDTSDSRLTNPVGCVNLTETGIYTSAPSCVCEYGNFSGFGYSNCYCNQIGYRGNPYLPGGCIDIDECEEGKGLSSCGELTCVNVPGSWRCELNGVGKIKPLFPGLVLGFPLLFLVLGIWGLIKFVKKRRKIIRKRMFFKRNGGLLLKQQLTTRGGNVQSSKIFSSKELEKATDNFNMNRVLGQGGQGTVYKGMLVDGRIVAVKRSKVLDEDKVEEFINEVGVLSQINHRNIVKLMGCCLETEVPILVYEHIPNGDLFKRLHHDSDDYTMTWDVRLRISVEIAGALAYLHSAASTPVYHRDVKTTNILLDEKYRAKVSDFGTSRSINVDQTHLTTLVAGTFGYLDPEYFQTSQFTDKSDVYSFGVVLVELITGEKPFSVMRPEENRGLVSHFNEAMKQNRVLDIVDSRIKEGCTLEQVLAVAKLARRCLSLKGKKRPNMREVSVELERIRSSPEDLELHIEEEDEEECAMEINMDDSWSVDMTAPASLFDLSPKLDVEPLVPQRTW

SEQ ID NO: 299 - DNA, 501 bp, Arabidopsis thaliana
atggtgcaaggcactctaggctatttagacccagaatactataccacagggcttctgaacgagaagagcgatgtgtatagctttggggtagtcctcatggaactgctctcaggtcaaaaggcattgtgctttgaacggccacaggcttcaaaacatttggtgagttactttgtttctgccacggaagagaataggttgcatgagattattgacgaccaagtgttgaacgaggataatctgaaggagatccaggaagctgcaagaattgctgcagagtgtacaaggctaatgggaaaagaaaggccaaggatgaaagaagtagctgtagagctagaaactttgagcgtcaaaacaaccaaacataattggtcggatcagtatcgagaggagaatttacacttgcttggtagcaacatcgtgtcttcccaaggcgataccaatagccgtggttatgacagcgtcaagaatgtagcattgcttgacattgaagctggccgctga

SEQ ID NO: 300 - protein, 166 aa, Arabidopsis thaliana
MVQGTLGYLDPEYYTTGLLNEKSDVYSFGVVLMELLSGQKALCFERPQASKHLVSYFVSATEENRLHEIIDDQVLNEDNLKEIQEAARIAAECTRLMGKERPRMKEVAVELETLSVKTTKHNWSDQYREENLHLLGSNIVSSQGDTNSRGYDSVKNVALLDIEAGR

SEQ ID NO: 301 - DNA, 660 bp, Arabidopsis thaliana
atgatcataaaatcatcagcacattccacgggtaacccttatgttctaaacggctgtaaagatattgacgagtgtaaggagcttgcaaatggacgtcctaatatttgtaccgacggtggaacttgccaaaatagtcccgaaagctatcgatgcgacttgcgagatcagaaagagtcagacgatcctcatttgtgtagaaccaccatcggcgtcttgatcgtcttgcttgttatcgttagctgtataaaacagaaaattaagcaccgtaaagacattgagctccgacaaatattcttcgagcaaaatggcggtggcatgttgatacatcgactctcaggatcagggccatcaaatgttgatgttaaaatatttactgaggaagccatgaaggaagcaactaatagttatgatgagagcaggatattgggccagggaggccagggaaaagtgtacaaagggatactgtcggataatttcatagttgcaataaaaaaagctcgactaggagacagtagccaagtagagcacttcatcaacgaagtgctcatactctctcaaattaatcacatgaacgtaatcaagattttgggctgctgtctggagatcgagctttttttattgcaactagcattaggatctttagttattaggcatagttag

SEQ ID NO: 302 - protein, 219 aa, Arabidopsis thaliana
MIIKSSAHSTGNPYVLNGCKDIDECKELANGRPNICTDGGTCQNSPESYRCDLRDQKESDDPHLCRTTIGVLIVLLVIVSCIKQKIKHRKDIELRQIFFEQNGGGMLIHRLSGSGPSNVDVKIFTEEAMKEATNSYDESRILGQGGQGKVYKGILSDNFIVAIKKARLGDSSQVEHFINEVLILSQINHMNVIKILGCCLEIELFLLQLALGSLVIRHS

SEQ ID NO: 303 - DNA, 4139 bp, Artificial sequence
  OsWAK32_tr expression cassette
aatccgaaaagtttctgcaccgttttcaccccctaactaacaatatagggaacgtgtgctaaatataaaatgagaccttatatatgtagcgctgataactagaactatgcaagaaaaactcatccacctactttagtggcaatcgggctaaataaaaaagagtcgctacactagtttcgttttccttagtaattaagtgggaaaatgaaatcattattgcttagaatatacgttcacatctctgtcatgaagttaaattattcgaggtagccataattgtcatcaaactcttcttgaataaaaaaatctttctagctgaactcaatgggtaaagagagagattttttttaaaaaaatagaatgaagatattctgaacgtattggcaaagatttaaacatataattatataattttatagtttgtgcattcgtcatatcgcacatcattaaggacatgtcttactccatcccaatttttatttagtaattaaagacaattgacttatttttattatttatcttttttcgattagatgcaaggtacttacgcacacactttgtgctcatgtgcatgtgtgagtgcacctcctcaatacacgttcaactagcaacacatctctaatatcactcgcctatttaatacatttaggtagcaatatctgaattcaagcactccaccatcaccagaccacttttaataatatctaaaatacaaaaaataattttacagaatagcatgaaaagtatgaaacgaactatttaggtttttcacatacaaaaaaaaaaagaattttgctcgtgcgcgagcgccaatctcccatattgggcacacaggcaacaacagagtggctgcccacagaacaacccacaaaaaacgatgatctaacggaggacagcaagtccgcaacaaccttttaacagcaggctttgcggccaggagagaggaggagaggcaaagaaaaccaagcatcctcctcctcccatctataaattcctccccccttttcccctctctatataggaggcatccaagccaagaagagggagagcaccaaggacacgcgactagcagaagccgagcgaccgccttcttcgatccatatcttccggtcgagttcttggtcgatctcttccctcctccacctcctcctcacagggtatgtgcccttcggttgttcttggatttattgttctaggttgtgtagtacgggcgttgatgttaggaaaggggatctgtatctgtgatgattcctgttcttggatttgggatagaggggttcttgatgttgcatgttatcggttcggtttgattagtagtatggttttcaatcgtctggagagctctatggaaatgaaatggtttagggtacggaatcttgcgattttgtgagtaccttttgtttgaggtaaaatcagagcaccggtgattttgcttggtgtaataaaagtacggttgtttggtcctcgattctggtagtgatgcttctcgatttgacgaagctatcctttgtttattccctattgaacaaaaataatccaactttgaagacggtcccgttgatgagattgaatgattgattcttaagcctgtccaaaatttcgcagctggcttgtttagatacagtagtccccatcacgaaattcatggaaacagttataatcctcaggaacaggggattccctgttcttccgatttgctttagtcccagaattttttttcccaaatatcttaaaaagtcactttctggttcagttcaatgaattgattgctacaaataatgcttttatagcgttatcctagctgtagttcagttaataggtaatacccctatagtttagtcaggagaagaacttatccgatttctgatctccatttttaattatatgaaatgaactgtagcataagcagtattcatttggattattttttttattagctctcaccccttcattattctgagctgaaagtctggcatgaactgtcctcaattttgttttcaaattcacatcgattatctatgcattatcctcttgtatctacctgtagaagtttctttttggttattccttgactgcttgattacagaaagaaatttatgaagctgtaatcgggatagttatactgcttgttcttatgattcatttcctttgtgcagttcttggtgtagcttgccactttcaccagcaaagttcatttaaatcaactagggatatcacaagtttgtacaaaaaagcaggcttaaacaatgagcctcttcgatggattacttcctctgctactaattgtgtttactatgacccctgtgatacaagcttcaaacagaactacaagccttccatctgctgccacgcttgcaggttgccaaagaagctgcagtaatctgaccatcgactatccctttggaattggatcatcccattgctctaggcagcccgatttcgagctcatctgcaacaataccacacaaccaccaaggctgttattcaagaatggcaccactgagatcattgactctcccagtactgaatatttggacgttatgttttcccattccatctccatgaaatccaatgtcagtgtgtacaacatgtcatgggatgctcctgggaaatctttcacccttggatatgctagactaaacatcaccggctgtgatttcgatatataccaggtgctcgatcaaagtggaaatgttcctgccaagctttgcaacgttacatgcccaaacaggggaatcacagaggacattgctaggcaggactgcaatggcaccggatgctgctccatcgatgttccaattcgtgctcagaccttacagcttatgtttgtccgccatggcaaaggggcggtcgaacttgacgcacaatccaaccaaagctccctgtggagcacaatcaatgtaacaacagtttacgctgtcattttgtggagaatcctggaccaaccgacgtgtgccagcaccttcgataacaggaccaactatgcctgtattagtgagcacagcaaatgcatggatggctatttcgcaccgattcttggttacaattgcttatgtgatggtgggtaccaaggaaatccatatatactagatggctgctcacgtgatagaggatataatccattccaacagaaggatgtctgcgacagaaagtgcgggagcattgatgtcccatatccatttggcctagaagaagggtgcgctgcaaggaaatcatttcagctaaactgcacaaacatgttatcgtccagcctccaactgaacgatgaataccatgtaacgtatataaatgtcagcaatgggctcatgggcgtagaagacaccacagattacaaacagtacatgtatgggatgcgtgtgacgcaggagcctcaactctatatcggatctggggaatcagcctcagtgcaatgggctgttgctaatctaacctgcctagaggcacagcaaaatatatctggatatgcttgtgttagcatcaatagcacatgcttgggtgtcaactcaacagatgattacattgggtatcggtgtagttgcacacttggcttccaaggaaatccatatatccaagatggttgccaagatattaatgaatgtttggtgccaaacaaatgtaaaggagtatgctacaatactcctggaagttaccgttgcactgcttgccctgataaaacacagtatgatatgacaacaatgcagtgcacccggacaagaagacaaagtcttatgttaggtgttgtcattggacttagctgtggcttcagcatcctacttctcagcttaggaataatgcttctcattcatagatggaaaaaagacatacaaaagcaataatgaacccagctttcttgtacaaagtggtgatatcacaagcccgggcggtcttctagggataacagggtaattatatccctctagatcacaagcccgggcggtcttctacgatgattgagtaataatgtgtcacgcatcaccatgggtggcagtgtcagtgtgagcaatgacctgaatgaacaattgaaatgaaaagaaaaaaagtactccatctgttccaaattaaaattcattttaaccttttaataggtttatacaataattgatatatgttttctgtatatgtctaatttgttatcatcc

SEQ ID NO: 304 - DNA, 3686 bp, Artificial sequence
  OsWAK85_tr expression cassette
aatccgaaaagtttctgcaccgttttcaccccctaactaacaatatagggaacgtgtgctaaatataaaatgagaccttatatatgtagcgctgataactagaactatgcaagaaaaactcatccacctactttagtggcaatcgggctaaataaaaaagagtcgctacactagtttcgttttccttagtaattaagtgggaaaatgaaatcattattgcttagaatatacgttcacatctctgtcatgaagttaaattattcgaggtagccataattgtcatcaaactcttcttgaataaaaaaatctttctagctgaactcaatgggtaaagagagagattttttttaaaaaaatagaatgaagatattctgaacgtattggcaaagatttaaacatataattatataattttatagtttgtgcattcgtcatatcgcacatcattaaggacatgtcttactccatcccaatttttatttagtaattaaagacaattgacttatttttattatttatcttttttcgattagatgcaaggtacttacgcacacactttgtgctcatgtgcatgtgtgagtgcacctcctcaatacacgttcaactagcaacacatctctaatatcactcgcctatttaatacatttaggtagcaatatctgaattcaagcactccaccatcaccagaccacttttaataatatctaaaatacaaaaaataattttacagaatagcatgaaaagtatgaaacgaactatttaggtttttcacatacaaaaaaaaaaagaattttgctcgtgcgcgagcgccaatctcccatattgggcacacaggcaacaacagagtggctgcccacagaacaacccacaaaaaacgatgatctaacggaggacagcaagtccgcaacaaccttttaacagcaggctttgcggccaggagagaggaggagaggcaaagaaaaccaagcatcctcctcctcccatctataaattcctccccccttttcccctctctatataggaggcatccaagccaagaagagggagagcaccaaggacacgcgactagcagaagccgagcgaccgccttcttcgatccatatcttccggtcgagttcttggtcgatctcttccctcctccacctcctcctcacagggtatgtgcccttcggttgttcttggatttattgttctaggttgtgtagtacgggcgttgatgttaggaaaggggatctgtatctgtgatgattcctgttcttggatttgggatagaggggttcttgatgttgcatgttatcggttcggtttgattagtagtatggttttcaatcgtctggagagctctatggaaatgaaatggtttagggtacggaatcttgcgattttgtgagtaccttttgtttgaggtaaaatcagagcaccggtgattttgcttggtgtaataaaagtacggttgtttggtcctcgattctggtagtgatgcttctcgatttgacgaagctatcctttgtttattccctattgaacaaaaataatccaactttgaagacggtcccgttgatgagattgaatgattgattcttaagcctgtccaaaatttcgcagctggcttgtttagatacagtagtccccatcacgaaattcatggaaacagttataatcctcaggaacaggggattccctgttcttccgatttgctttagtcccagaattttttttcccaaatatcttaaaaagtcactttctggttcagttcaatgaattgattgctacaaataatgcttttatagcgttatcctagctgtagttcagttaataggtaatacccctatagtttagtcaggagaagaacttatccgatttctgatctccatttttaattatatgaaatgaactgtagcataagcagtattcatttggattattttttttattagctctcaccccttcattattctgagctgaaagtctggcatgaactgtcctcaattttgttttcaaattcacatcgattatctatgcattatcctcttgtatctacctgtagaagtttctttttggttattccttgactgcttgattacagaaagaaatttatgaagctgtaatcgggatagttatactgcttgttcttatgattcatttcctttgtgcagttcttggtgtagcttgccactttcaccagcaaagttcatttaaatcaactagggatatcacaagtttgtacaaaaaagcaggcttaaacaatgaccaagcttctccactccgcctgccttctcatctgcatttcaggcgccatcgggttggccgcggctgctgccggacacccaggctgccagacgaggtgcggggacgtcgacatcccgttccccttcggcatcggcgatcactgcgcgattcacgagggttttcggctcgagtgcggcaacgccacgaaaggcaccagcaatcagaagcctttctggggggacttcgaggtgatcaagatctccatggaagacggcaaggtctgggtgaaggcgtacatgtccaggcagtgctacgaccaatccacgggcggtatgtcatacagcgacgcatcggcgaatttgagtggttcatctttctggttatcggacacggataacaaaattaccgtgatcggatgcaagactctcgcctacatgacgaccgattcttatgtaatcgggtgttcgtcagcatgcgacaacaaagtgaacaaactaactcccaagaatggttcatgctctggcgctggctgctgccaggcaaatgttcctaagagcatacagtactaccagggttatttcaacgaaggctacaacaccactaaaatatggatgagcagcccttgcagctacatggcagtgatggaaaccgcagcattcaactttagcacaagttacctcacatccagcgtattttatgacacgtacaaggggggagttccggttgtctacgactgggccataacatcaaaaacatgtacagaatctagaagaaacaagacttcctacgcatgtattagtaacaacagtcagtgcattgacaacctgacgaatgcacaaggttaccgctgcaagtgctccaatggatatgaaggcaacccgtacataaaggatggttgcaaagatattgatgagtgcctcaacaatgctacttacccttgcaaggggatatgcaccaacacgttggggaatttcacctgctcatgctccccaggaagttatatgatgaatggagattgtatgccaaagaagaaactacgttttgactcagtgcctgtggtagtaggcgcaagtatcatatctgttgtcctggtgattaccataatgtgtgcttacttgatcaaagagagaagaaagctacagctcatcaaataatgaacccagctttcttgtacaaagtggtgatatcacaagcccgggcggtcttctagggataacagggtaattatatccctctagatcacaagcccgggcggtcttctacgatgattgagtaataatgtgtcacgcatcaccatgggtggcagtgtcagtgtgagcaatgacctgaatgaacaattgaaatgaaaagaaaaaaagtactccatctgttccaaattaaaattcattttaaccttttaataggtttatacaataattgatatatgttttctgtatatgtctaatttgttatcatcc

SEQ ID NO: 305 - DNA, 3653 bp, Artificial sequence
  OsWAK53a_tr expression cassette
aatccgaaaagtttctgcaccgttttcaccccctaactaacaatatagggaacgtgtgctaaatataaaatgagaccttatatatgtagcgctgataactagaactatgcaagaaaaactcatccacctactttagtggcaatcgggctaaataaaaaagagtcgctacactagtttcgttttccttagtaattaagtgggaaaatgaaatcattattgcttagaatatacgttcacatctctgtcatgaagttaaattattcgaggtagccataattgtcatcaaactcttcttgaataaaaaaatctttctagctgaactcaatgggtaaagagagagattttttttaaaaaaatagaatgaagatattctgaacgtattggcaaagatttaaacatataattatataattttatagtttgtgcattcgtcatatcgcacatcattaaggacatgtcttactccatcccaatttttatttagtaattaaagacaattgacttatttttattatttatcttttttcgattagatgcaaggtacttacgcacacactttgtgctcatgtgcatgtgtgagtgcacctcctcaatacacgttcaactagcaacacatctctaatatcactcgcctatttaatacatttaggtagcaatatctgaattcaagcactccaccatcaccagaccacttttaataatatctaaaatacaaaaaataattttacagaatagcatgaaaagtatgaaacgaactatttaggtttttcacatacaaaaaaaaaaagaattttgctcgtgcgcgagcgccaatctcccatattgggcacacaggcaacaacagagtggctgcccacagaacaacccacaaaaaacgatgatctaacggaggacagcaagtccgcaacaaccttttaacagcaggctttgcggccaggagagaggaggagaggcaaagaaaaccaagcatcctcctcctcccatctataaattcctccccccttttcccctctctatataggaggcatccaagccaagaagagggagagcaccaaggacacgcgactagcagaagccgagcgaccgccttcttcgatccatatcttccggtcgagttcttggtcgatctcttccctcctccacctcctcctcacagggtatgtgcccttcggttgttcttggatttattgttctaggttgtgtagtacgggcgttgatgttaggaaaggggatctgtatctgtgatgattcctgttcttggatttgggatagaggggttcttgatgttgcatgttatcggttcggtttgattagtagtatggttttcaatcgtctggagagctctatggaaatgaaatggtttagggtacggaatcttgcgattttgtgagtaccttttgtttgaggtaaaatcagagcaccggtgattttgcttggtgtaataaaagtacggttgtttggtcctcgattctggtagtgatgcttctcgatttgacgaagctatcctttgtttattccctattgaacaaaaataatccaactttgaagacggtcccgttgatgagattgaatgattgattcttaagcctgtccaaaatttcgcagctggcttgtttagatacagtagtccccatcacgaaattcatggaaacagttataatcctcaggaacaggggattccctgttcttccgatttgctttagtcccagaattttttttcccaaatatcttaaaaagtcactttctggttcagttcaatgaattgattgctacaaataatgcttttatagcgttatcctagctgtagttcagttaataggtaatacccctatagtttagtcaggagaagaacttatccgatttctgatctccatttttaattatatgaaatgaactgtagcataagcagtattcatttggattattttttttattagctctcaccccttcattattctgagctgaaagtctggcatgaactgtcctcaattttgttttcaaattcacatcgattatctatgcattatcctcttgtatctacctgtagaagtttctttttggttattccttgactgcttgattacagaaagaaatttatgaagctgtaatcgggatagttatactgcttgttcttatgattcatttcctttgtgcagttcttggtgtagcttgccactttcaccagcaaagttcatttaaatcaactagggatatcacaagtttgtacaaaaaagcaggcttaaacaatggcaaagatgatgctttaccttcttctcctgccattgctcctcctcacatgcatctttgcatcttatgttcattcgatggaatcaagcacctccaagtgctccaatattcccatcccttatccctttggtattcttggtgggaaccctgccccagcccaagggtttgagatcacatgtgcctcatctggcccgatggtacgcattaacaatatcatgtttgggattcttaacatctcgttgctggatggttttgtaagcatcttggccagtgccacttctcagcagtgcaaaaggaattctagcttcagccttgaggggaccaatttcacgttctcagatacaagaaacaaatttacagctctgggttgtgatatggtagccatgctattgaacggtagcagcgggtatagcggtggctgtgcttctttttgctccaccaaaagcaatataattgatggtatgtgctctggcgtggcttgctgccaagcaccagtaccgaaggggttaaagaagcttgagttggagttcactaacataactgggcagctcagcaggcccaaggaggtcaataatactccaacatgtggcgaggctttcatcgtggagcagaactcctatgttttctctagtgttgatctgagcaacactaacaggaacaatcctcaataccgccctgttgttcttgagtggtccattgatggtggctactgtgaggaggcgaaccgcttcatgtcatatgcctgcaaggagaactcctactgctataactcatcaaatggaattggataccgctgcaattgctcccttgggtttcaggggaacccttacttgcaagggcccgatggatgccaagatattgatgaatgcaccattaagaggccatgcacgcataagtgcatcaacacgaaagggagtttctactgcatgtgcccagcagggatgagaggtgatggcttgaaggagggcagtggctgcaatggaattggcacactgttgattggaatagttactggactagctctgctactgcttctccttgttctcatattctggacccattggcttgttaagaagagaaaacttgcgaagataagacagtaatgaacccagctttcttgtacaaagtggtgatatcacaagcccgggcggtcttctagggataacagggtaattatatccctctagatcacaagcccgggcggtcttctacgatgattgagtaataatgtgtcacgcatcaccatgggtggcagtgtcagtgtgagcaatgacctgaatgaacaattgaaatgaaaagaaaaaaagtactccatctgttccaaattaaaattcattttaaccttttaataggtttatacaataattgatatatgttttctgtatatgtctaatttgttatcatcc

SEQ ID NO: 306 - DNA, 2194 bp, Oryza sativa
aatccgaaaagtttctgcaccgttttcaccccctaactaacaatatagggaacgtgtgctaaatataaaatgagaccttatatatgtagcgctgataactagaactatgcaagaaaaactcatccacctactttagtggcaatcgggctaaataaaaaagagtcgctacactagtttcgttttccttagtaattaagtgggaaaatgaaatcattattgcttagaatatacgttcacatctctgtcatgaagttaaattattcgaggtagccataattgtcatcaaactcttcttgaataaaaaaatctttctagctgaactcaatgggtaaagagagagattttttttaaaaaaatagaatgaagatattctgaacgtattggcaaagatttaaacatataattatataattttatagtttgtgcattcgtcatatcgcacatcattaaggacatgtcttactccatcccaatttttatttagtaattaaagacaattgacttatttttattatttatcttttttcgattagatgcaaggtacttacgcacacactttgtgctcatgtgcatgtgtgagtgcacctcctcaatacacgttcaactagcaacacatctctaatatcactcgcctatttaatacatttaggtagcaatatctgaattcaagcactccaccatcaccagaccacttttaataatatctaaaatacaaaaaataattttacagaatagcatgaaaagtatgaaacgaactatttaggtttttcacatacaaaaaaaaaaagaattttgctcgtgcgcgagcgccaatctcccatattgggcacacaggcaacaacagagtggctgcccacagaacaacccacaaaaaacgatgatctaacggaggacagcaagtccgcaacaaccttttaacagcaggctttgcggccaggagagaggaggagaggcaaagaaaaccaagcatcctccttctcccatctataaattcctccccccttttcccctctctatataggaggcatccaagccaagaagagggagagcaccaaggacacgcgactagcagaagccgagcgaccgccttctcgatccatatcttccggtcgagttcttggtcgatctcttccctcctccacctcctcctcacagggtatgtgcctcccttcggttgttcttggatttattgttctaggttgtgtagtacgggcgttgatgttaggaaaggggatctgtatctgtgatgattcctgttcttggatttgggatagaggggttcttgatgttgcatgttatcggttcggtttgattagtagtatggttttcaatcgtctggagagctctatggaaatgaaatggtttagggatcggaatcttgcgattttgtgagtaccttttgtttgaggtaaaatcagagcaccggtgattttgcttggtgtaataaagtacggttgtttggtcctcgattctggtagtgatgcttctcgatttgacgaagctatcctttgtttattccctattgaacaaaaataatccaactttgaagacggtcccgttgatgagattgaatgattgattcttaagcctgtccaaaatttcgcagctggcttgtttagatacagtagtccccatcacgaaattcatggaaacagttataatcctcaggaacaggggattccctgttcttccgatttgctttagtcccagaattttttttcccaaatatcttaaaaagtcactttctggttcagttcaatgaattgattgctacaaataatgcttttatagcgttatcctagctgtagttcagttaataggtaatacccctatagtttagtcaggagaagaacttatccgatttctgatctccatttttaattatatgaaatgaactgtagcataagcagtattcatttggattattttttttattagctctcaccccttcattattctgagctgaaagtctggcatgaactgtcctcaattttgttttcaaattcacatcgattatctatgcattatcctcttgtatctacctgtagaagtttctttttggttattccttgactgcttgattacagaaagaaatttatgaagctgtaatcgggatagttatactgcttgttcttatgattcatttcctttgtgcagttcttggtgtagcttgccactttcaccagcaaagttc

SEQ ID NO: 307 - DNA, 53 bp, Artificial sequence
  primer: prm16798
ggggacaagtttgtacaaaaaagcaggcttaaacaatgaccaagcttctccac

SEQ ID NO: 308 - DNA, 55 bp, Artificial sequence
  primer: prm16761
ggggaccactttgtacaagaaagctgggttcattatttgatgagctgtagctttc

SEQ ID NO: 309 - DNA, 20 bp, Artificial sequence
  primer: prm16656
atggcaaagatgatgcttta

SEQ ID NO: 310 - DNA, 57 bp, Artificial sequence
  primer: prm16657
ggggaccactttgtacaagaaagctgggttcattactgtcttatcttcgcaagtttt

SEQ ID NO: 311 - DNA, 57 bp, Artificial sequence
  primer: prm16710
ggggacaagtttgtacaaaaaagcaggcttaaacaatgagcctcttcgatggattac

SEQ ID NO: 312 - DNA, 59 bp, Artificial sequence
  primer: prm16711
ggggaccactttgtacaagaaagctgggttcattattgcttttgtatgtcttttttcca

SEQ ID NO: 313 - DNA, 54 bp, Artificial sequence
  primer: prm16603
ggggacaagtttgtacaaaaaagcaggcttaaacaatgggacctgtgctgctgt

SEQ ID NO: 314 - DNA, 58 bp, Artificial sequence
  primer: prm16604
ggggaccactttgtacaagaaagctgggttcattattttctttgcatatgtctcctcc

SEQ ID NO: 315 - DNA, 51 bp, Artificial sequence
  primer: prm16118
ggggacaagtttgtacaaaaaagcaggcttaaacaatgtctccccaccgag

SEQ ID NO: 316 - DNA, 46 bp, Artificial sequence
  primer: prm16119
ggggaccactttgtacaagaaagctgggtcatcgatcatctcgcaa

SEQ ID NO: 317 - DNA, 390 bp, Arabidopsis thaliana
atggagaaatacgagaagctcgaaaaggtcggtgaaggaacctatggaaaagtctacaaagcaatggagaaaaccaccggaaaactcgtcgctctgaagaaaactaggctcgaaatggacgaagaaggtataccaccaacggctctccgtgagatctctcttctccaaatgctttctcaatcaatctacatcgttcgtctcctctgcgtcgaacatgttattcaatcgaaagattcgactgtttctcactctcccaaatccaatctctatctcgtttttgagtatctcgacactgatctcaagaaatttatagattctcatagaaagggctcgaatcctagaccgcttgaggcttctcttgtgcagaggtttatgtttcagcttttttaa

SEQ ID NO: 318 - protein, 129 aa, Arabidopsis thaliana
MEKYEKLEKVGEGTYGKVYKAMEKTTGKLVALKKTRLEMDEEGIPPTALREISLLQMLSQSIYIVRLLCVEHVIQSKDSTVSHSPKSNLYLVFEYLDTDLKKFIDSHRKGSNPRPLEASLVQRFMFQLF

SEQ ID NO: 319 - DNA, 936 bp, Arabidopsis thaliana
atggagaaatacgagaagctcgaaaaggtcggtgaaggaacctatggaaaagtctacaaagcaatggagaaaaccaccggaaaactcgtcgctctgaagaaaactaggctcgaaatggacgaagaaggtataccaccaacggctctccgtgagatctctcttctccaaatgctttctcaatcaatctacatcgttcgtctcctctgcgtcgaacatgttattcaatcgaaagattcgactgtttctcactctcccaaatccaatctctatctcgtttttgagtatctcgacactgatctcaagaaatttatagattctcatagaaagggctcgaatcctagaccgcttgaggcttctcttgtgcagaggtttatgtttcagctttttaaaggtgtggctcattgtcatagccatggtgtgcttcaccgtgatcttaaaccgcagaatcttctattggataaggataaagggattcttaagattgctgatttgggtcttagtcgtgcttttactgtgcctcttaaggcttatacacatgagattgttactctttggtatagagctcctgaagttttgcttggttctactcattactctactgctgttgatatttggtctgttggatgcatctttgccgagatgattaggaggcaagctcttttccctggtgattctgagtttcagcaactacttcatattttcagattgttaggaacaccaactgagcagcaatggccgggtgtaatggcattgcgtgactggcatgtctatccaaagtgggagccgcaagacttatcacgtgctgttccatctctatctcctgaaggaattgatcttctcacgcaaatgttgaagtacaatccagcagaaagaatttcagcaaaagcagctctcgatcatccctactttgacagccttgacaaatctcagttctga

SEQ ID NO: 320 - protein, 311 aa, Arabidopsis thaliana
MEKYEKLEKVGEGTYGKVYKAMEKTTGKLVALKKTRLEMDEEGIPPTALREISLLQMLSQSIYIVRLLCVEHVIQSKDSTVSHSPKSNLYLVFEYLDTDLKKFIDSHRKGSNPRPLEASLVQRFMFQLFKGVAHCHSHGVLHRDLKPQNLLLDKDKGILKIADLGLSRAFTVPLKAYTHEIVTLWYRAPEVLLGSTHYSTAVDIWSVGCIFAEMIRRQALFPGDSEFQQLLHIFRLLGTPTEQQWPGVMALRDWHVYPKWEPQDLSRAVPSLSPEGIDLLTQMLKYNPAERISAKAALDHPYFDSLDKSQF

SEQ ID NO: 321 - DNA, 930 bp, Arabidopsis thaliana
atggagaagtacgagaagctagagaaggtcggagaaggaacatacgggaaagtctacaaagcgatggagaaaggaactggtaagcttgttgctctgaagaaaactcgtctcgagatggacgaagaaggtattccaccaactgctcttcgtgagatctcgcttctccagatgttatcaacatcgatctatgttgttcgattactctgcgtcgaacatgttcatcaaccatcaaccaaatctcaatctaccaaatccaatctctatctcgttttcgagtatctcgatactgatcttaagaaattcatcgattcgtataggaaaggacctaatcctaagcctcttgagccttttttgattcagaagttgatgtttcagctttgtaaaggtgttgcgcattgtcatagtcatggtgtgcttcaccgtgatcttaaaccgcagaatcttcttctggtgaaagataaagagcttcttaagattgctgatttgggtcttggtcgtgcttttactgttcctcttaagtcttatacgcatgagattgttactctttggtatagagctcctgaagttcttcttggatctactcattattcaactggtgttgacatgtggtctgttggttgtatctttgctgagatggttcggaggcaagctcttttccctggtgattctgagtttcagcaattgcttcatatcttcaggttgctaggaacaccaactgagcagcaatggccgggtgtttccacactgcgtgactggcatgtttaccctaagtgggagccgcaagacttaactcttgctgttccttctctttcacctcaaggagttgatcttctcacgaaaatgctcaagtacaatccagccgaaagaatttcagcaaaaacagcacttgatcacccatattttgacagccttgacaagtctcagttctga

SEQ ID NO: 322 - protein, 309 aa, Arabidopsis thaliana
MEKYEKLEKVGEGTYGKVYKAMEKGTGKLVALKKTRLEMDEEGIPPTALREISLLQMLSTSIYVVRLLCVEHVHQPSTKSQSTKSNLYLVFEYLDTDLKKFIDSYRKGPNPKPLEPFLIQKLMFQLCKGVAHCHSHGVLHRDLKPQNLLLVKDKELLKIADLGLGRAFTVPLKSYTHEIVTLWYRAPEVLLGSTHYSTGVDMWSVGCIFAEMVRRQALFPGDSEFQQLLHIFRLLGTPTEQQWPGVSTLRDWHVYPKWEPQDLTLAVPSLSPQGVDLLTKMLKYNPAERISAKTALDHPYFDSLDKSQF

SEQ ID NO: 323 - DNA, 774 bp, Arabidopsis thaliana
atggagaaatacgagaagctcgaaaaggtcggtgaaggaacctatggaaaagtctacaaagcaatggagaaaaccaccggaaaactcgtcgctctgaagaaaactaggctcgaaatggacgaagaaggtataccaccaacggctctccgtgagatctctcttctccaaatgctttctcaatcaatctacatcgttcgtctcctctgcgtcgaacatgttattcaatcgaaagattcgactgtttctcactctcccaaatccaatctctatctcgtttttgagtatctcgacactgatctcaagaaatttatagattctcatagaaagggctcgaatcctagaccgcttgaggcttctcttgtgcagaggtttatgtttcagctttttaaaggtgtggctcattgtcatagccatggtgtgcttcaccgtgatcttaaaccgcagaatcttctattggataaggataaagggattcttaagattgctgatttgggtcttagtcgtgcttttactgtgcctcttaaggcttatacacatgagattgttactctttggtatagagctcctgaagttttgcttggttctactcattactctactgctgttgatatttggtctgttggatgcatctttgccgagatgattaggaggcaagctcttttccctggtgattctgagtttcagcaactacttcatattttcaggtatttgcttcttgtttttgatgccaatgtgtatgtatacaggaaccagtttaggactttagcccattag

SEQ ID NO: 324 - protein, 257 aa, Arabidopsis thaliana
MEKYEKLEKVGEGTYGKVYKAMEKTTGKLVALKKTRLEMDEEGIPPTALREISLLQMLSQSIYIVRLLCVEHVIQSKDSTVSHSPKSNLYLVFEYLDTDLKKFIDSHRKGSNPRPLEASLVQRFMFQLFKGVAHCHSHGVLHRDLKPQNLLLDKDKGILKIADLGLSRAFTVPLKAYTHEIVTLWYRAPEVLLGSTHYSTAVDIWSVGCIFAEMIRRQALFPGDSEFQQLLHIFRYLLLVFDANVYVYRNQFRTLAH

SEQ ID NO: 325 - DNA, 942 bp, Arabidopsis thaliana
atggacgagggagttatagcagtttccgccatggatgctttcgagaagcttgagaaagttggtgaagggacatacgggaaagtttacagagccagagagaaagctaccgggaaaatcgtcgctctaaagaagacgcgtctccatgaggacgaagaaggcgttccttccaccactctccgcgagatctccattttgcgaatgctcgctcgtgatcctcacgtcgtcaggttaatggatgttaagcaaggactaagcaaagaaggcaaaactgtactgtacctggtttttgaatacatggacactgatgtcaagaaattcatcagaagtttccgtagcactggcaagaacattccaacccaaactatcaagagcttgatgtatcaactatgcaaaggtatggcattctgccatggtcacgggatattgcacagagatctcaagcctcacaatctcttgatggatcccaagacaatgaggctcaaaatagcagatcttggtttagccagagccttcactctgccaatgaagaagtatacccatgagatattaactctttggtatagagctccagaggttcttcttggtgccacccattactctacagctgtggatatgtggtctgttggctgcatatttgctgaacttgtgaccaaccaagcaatctttcagggagactctgagctccaacagctcctccatattttcaagttgtttgggacacccaatgaagaaatgtggccaggagtgagcacactcaagaactggcatgaatacccacagtggaaaccatcgactctatcctctgctgttccaaacctcgacgaggctggagttgatcttctatctaaaatgctgcagtacgagccagcgaaacgaatctcagcaaagatggctatggagcatccttactttgatgatctgccagaaaagtcctctctctaa

SEQ ID NO: 326 - protein, 313 aa, Arabidopsis thaliana
MDEGVIAVSAMDAFEKLEKVGEGTYGKVYRAREKATGKIVALKKTRLHEDEEGVPSTTLREISILRMLARDPHVVRLMDVKQGLSKEGKTVLYLVFEYMDTDVKKFIRSFRSTGKNIPTQTIKSLMYQLCKGMAFCHGHGILHRDLKPHNLLMDPKTMRLKIADLGLARAFTLPMKKYTHEILTLWYRAPEVLLGATHYSTAVDMWSVGCIFAELVTNQAIFQGDSELQQLLHIFKLFGTPNEEMWPGVSTLKNWHEYPQWKPSTLSSAVPNLDEAGVDLLSKMLQYEPAKRISAKMAMEHPYFDDLPEKSSL

SEQ ID NO: 327 - DNA, 948 bp, Arabidopsis thaliana
atggacaacaatggagttaaacccgctgtttccgccatggaagcctttgaaaagcttgagaaagtaggtgaagggacttatgggaaagtttacagagcaagagagaaagctactgggatgatcgttgctttgaagaagacgcgtctccatgaggatgaagaaggtgttcctcccactactcttcgcgagatctctatcttgcgtatgctcgctcgtgatcctcacatcgttaggttgatggatgttaagcaaggaataaacaaagaaggaaaaactgtactttaccttgttttcgagtatgttgatactgatctcaagaaattcatcagaagctttcgtcaagctggacagaacattccacaaaatactgtcaagtgcttgatgtaccagttatgcaaaggcatggctttttgccatggtcatggagtgttgcacagggatcttaagcctcacaatctcttgatggaccggaagacaatgacgctcaaaatagcagatcttggattagccagagccttcactctcccaatgaaaaagtatacacatgagattctaactctatggtatagagctccggaagttcttcttggagcaacccattactctactggagtggatatgtggtctgttggctgtatttttgctgaactagtgaccaagcaagcaatctttgcgggagactctgagctccaacagctcctccgtatattcaggttgttgggaacaccaaacgaagaagtttggcctggagtaagcaaactcaaggactggcatgaatacccgcaatggaaaccgttgagtctctccacagctgtgccaaacctcgacgaggctggacttgatctcttatctaaaatgctggagtacgagccagcaaaacgaatctcagcaaagaaagctatggagcatccttacttcgatgatttgcctgacaagtcctctctctga

SEQ ID NO: 328 - protein, 315 aa, Arabidopsis thaliana
MDNNGVKPAVSAMEAFEKLEKVGEGTYGKVYRAREKATGMIVALKKTRLHEDEEGVPPTTLREISILRMLARDPHIVRLMDVKQGINKEGKTVLYLVFEYVDTDLKKFIRSFRQAGQNIPQNTVKCLMYQLCKGMAFCHGHGVLHRDLKPHNLLMDRKTMTLKIADLGLARAFTLPMKKYTHEILTLWYRAPEVLLGATHYSTGVDMWSVGCIFAELVTKQAIFAGDSELQQLLRIFRLLGTPNEEVWPGVSKLKDWHEYPQWKPLSLSTAVPNLDEAGLDLLSKMLEYEPAKRISAKKAMEHPYFDDLPDKSSL

SEQ ID NO: 329 - DNA, 936 bp, Glycine max
atggagaagacaggagtgttatcggcgaaggaggcattcgagaagcttgaaaaggtgggagaagggacatatgggaaggtgtacagagcaagagagaaggcaactgggaagatcgtggctctgaagaagactcgtctccacgaggacgaagaaggtgtccctcccaccactctccgtgaggtttccattctgcgaatgctctctcgcgatccccatgtcgttaggttaatggatgtcaaacaaggtcagaacaaggaagggaagacagtgctctacttggtatttgagtacatggacaccgatctcaagaaattcatacgctctttccgtcaatctggggaaaccattcctccccatatcatcaaaagcttgatgtaccagctttgcaagggcgttgctttctgccacggtcatgggatcttgcacagggacttgaagcctcacaatctcttgatggaccgaaaaaccatgatgcttaaaattgctgatcttggactcgctcgagcatttaccgtgccaattaagaaatatacacatgagatactaaccctgtggtatagagctcctgaagtcctcttgggtgctacccattactcaatggcggtggacatgtggtccgttggctgcatatttgccgaacttgtaaccaaacaagcactctttcctggtgattccgagctgcaacaactcctgcatatattcaggctattgggtactcccaatgaagatgtgtggccaggcgtgagtaaactaatgaactggcacgaatatcctcaatggaaccctcaaagtctatcaacggctgttccaagtttagatgagcttggactggatttgctatctcaaatgttgaaatatgaaccttccaagaggatttctgccaagaaagcaatggaacatgtatactttgatgacctggacaagaggcacctttag

SEQ ID NO: 330 - protein, 311 aa, Glycine max
MEKTGVLSAKEAFEKLEKVGEGTYGKVYRAREKATGKIVALKKTRLHEDEEGVPPTTLREVSILRMLSRDPHVVRLMDVKQGQNKEGKTVLYLVFEYMDTDLKKFIRSFRQSGETIPPHIIKSLMYQLCKGVAFCHGHGILHRDLKPHNLLMDRKTMMLKIADLGLARAFTVPIKKYTHEILTLWYRAPEVLLGATHYSMAVDMWSVGCIFAELVTKQALFPGDSELQQLLHIFRLLGTPNEDVWPGVSKLMNWHEYPQWNPQSLSTAVPSLDELGLDLLSQMLKYEPSKRISAKKAMEHVYFDDLDKRHL

SEQ ID NO: 331 - DNA, 945 bp, Glycine max
atggaaaagtacgagaagctggagaaggtgggagaaggaacatacgggaaagtgtacaaggctcgggagaaggcgagtgggagcctggtggctctgaagaagacgcgtctggagatggacgaggagggtgtccctcccaccgcactacgcgaggtgtctctccttcagcttctctcccaatccatctacatcgtccgcctcctctccgtcgaacacgtcgacaaggtccccaagtcccagaaatcctcctccaaccccctcaccaagcccatcctttaccttgttttcgagtatctcgacaccgatctcaagaagttcatcgattcccaccgcaagggccccaatcccaggcccctccctcctcccctcatccagagcttcctcttccagctctgcaagggcgtggctcactgccacagccacggtgtcctccaccgcgatctcaagccgcagaaccttctccttgaccagcacaagggtattcttaagatcgctgatctcggcctcggccgcgccttcaccgtccctctcaagagctacactcacgagatcgttactctctggtaccgtgcccccgaggttctccttggctctacccattactccactggggttgatatctggtctgttggctgcatctttgccgaaatggtgaggaggcaagctttgtttccgggggattctgagttccagcagctcattcacatattcaagatgttgggaactccaacagaggagaattggccaggagttacttctctgcgtgattggcatgtgtacccacgctgggaacctcagagcttggcaaagaatgtgccttccttaggacctgatggagtcgaccttctttcgaaaatgctcaagtataatccttctgagagaatatctgctaaggcagcacttgatcatccatactttgacagtcttgacaaatctcaattttag

SEQ ID NO: 332 - protein, 314 aa, Glycine max
MEKYEKLEKVGEGTYGKVYKAREKASGSLVALKKTRLEMDEEGVPPTALREVSLLQLLSQSIYIVRLLSVEHVDKVPKSQKSSSNPLTKPILYLVFEYLDTDLKKFIDSHRKGPNPRPLPPPLIQSFLFQLCKGVAHCHSHGVLHRDLKPQNLLLDQHKGILKIADLGLGRAFTVPLKSYTHEIVTLWYRAPEVLLGSTHYSTGVDIWSVGCIFAEMVRRQALFPGDSEFQQLIHIFKMLGTPTEENWPGVTSLRDWHVYPRWEPQSLAKNVPSLGPDGVDLLSKMLKYNPSERISAKAALDHPYFDSLDKSQF

SEQ ID NO: 333 - DNA, 948 bp, Glycine max
atggagaaaacgggcgcaggagtagtagtgttatcggcgaaggaggcattcgagaagcttgagaaggtcggagaagggacatacgggaaggtgtacagggcacgagagaaggccactgggaaaatcgttgctctcaagaagactcgtcttcacgaggaccaagacggtgttcctcccaccacacttcgcgaggtttccatcttgcgaatgctctctcgcgatccccatgtcgttagcttaatggatgtgaagcaaggccagaacaaggaagggaagacagtgttgtacttggtgtttgagtacatggacaccgatctcaagaaattcatccgctccttcgatcaaccgggacaaaacattccacccgaaactatcaaaagcttgatgtaccagctttgcaaggggattgctttctgccacggtcatgggatcttgcacagggacttgaaacctcacaatctgttgatggaccgaaaaacaatgatgcttaaaattgctgatcttggactcgctcgggcatttactgtgccaattaagaaatatacacatgagatactaaccctgtggtatagagctcctgaagtcctcttgggtgctacccattactcaatggcagtggacatatggtccgttggctgcatatttgccgaacttgtcaccagacgagctctctttcctggtgattccgagcttcaacaactcctgcatatattcaggctattgggtactcctaatgaagaggtgtggccaggggtgagtaaactaaaggactggcatgaatacccccaatggaactctcaaagtctgtcaacggctgttccaggtttggaggagcttggactcgatttgctatctcaaatgttggagtatgaaccttccaagaggatttctgcaaagaaagcaatggaacatgcttacttcgatgacctggacaagaggaatctttag

SEQ ID NO: 334 - protein, 315 aa, Glycine max
MEKTGAGVVVLSAKEAFEKLEKVGEGTYGKVYRAREKATGKIVALKKTRLHEDQDGVPPTTLREVSILRMLSRDPHVVSLMDVKQGQNKEGKTVLYLVFEYMDTDLKKFIRSFDQPGQNIPPETIKSLMYQLCKGIAFCHGHGILHRDLKPHNLLMDRKTMMLKIADLGLARAFTVPIKKYTHEILTLWYRAPEVLLGATHYSMAVDIWSVGCIFAELVTRRALFPGDSELQQLLHIFRLLGTPNEEVWPGVSKLKDWHEYPQWNSQSLSTAVPGLEELGLDLLSQMLEYEPSKRISAKKAMEHAYFDDLDKRNL

SEQ ID NO: 335 - DNA, 954 bp, Glycine max
atggagatggagaagacgggcgcaggagtagcagtgttgtcggcgaaggaggcattcgagaagcttgagaaggtcggagaagggacatacgggaaggtgtacagggcacgagagaaggccaccggaaagatcgttgctctcaagaagactcgcctccacgaggaccaagaaggcgtccctcccaccactctccgcgaggtttccatcttgcgaatgctctctcgcgatccccatgtcgttaggttaatggatgtgaagcaaggccagaacaaggaagggaagacagtgctctacttggtgtttgagtacatggacaccgatctcaagaaattcattcgctctttccgccaaaccggacaaagcattccaccccaaactatcaaaagcttgatgtatcagctttgcaaggggattgctttctgccacggtcatgggatcttgcacagggacttgaagcctcacaatctgttgatggaccggaaaacaatgatgcttaaaattgctgatcttggactcgctcgggcatttactgtgccaattaagaaatatacacacgagatattaaccctgtggtatagagctcctgaagtcctcttgggtgctacccattactcaatggcagtggacatatggtccgttggctgcatatttgccgaacttgtcaccaaacaagctctctttgctggtgattccgagctgcaacaactcctgcatatattcaggctattaggtactccaaatgaagaggtgtggccaggggtgagtaaactaaaggactggcatgaatacccccaatggaaccctaaaagtctgtcaacggctgttccaggtttggatgagcttggacttgatttgctatcccaaatgttggaatatgagccttccaagaggatttctgcaaagaaagcaatggaacatgcttacttcaatgacctggacaaggggcatctttag

SEQ ID NO: 336 - protein, 317 aa, Glycine max
MEMEKTGAGVAVLSAKEAFEKLEKVGEGTYGKVYRAREKATGKIVALKKTRLHEDQEGVPPTTLREVSILRMLSRDPHVVRLMDVKQGQNKEGKTVLYLVFEYMDTDLKKFIRSFRQTGQSIPPQTIKSLMYQLCKGIAFCHGHGILHRDLKPHNLLMDRKTMMLKIADLGLARAFTVPIKKYTHEILTLWYRAPEVLLGATHYSMAVDIWSVGCIFAELVTKQALFAGDSELQQLLHIFRLLGTPNEEVWPGVSKLKDWHEYPQWNPKSLSTAVPGLDELGLDLLSQMLEYEPSKRISAKKAMEHAYFNDLDKGHL

SEQ ID NO: 337 - DNA, 945 bp, Glycine max
atggagaagccaggaggaggaggagtgttatcggcgaaggaggcattcgagaagcttgaaaaggtgggagaagggacatatgggaaggtgtacagagcaagagagaaggccacggggaagatcgtggctctgaagaagactcgtctccacgaggacgaagaaggtgtccctcccaccactctccgtgaggtttccattctgcgaatgctctctcgcgatccccatgtcgttaggttaatggatgtcaaacaaggtcagaacaaggaagggaagacagtgctctacttggtctttgagtacatggacaccgatctcaagaaattcattcgctctttccgtcaaactggacaaaccgttccaccccaaaccatcaaaagcttgatgtaccagctttgcaagggcgttgctttctgccacggtcatgggatcttgcacagggacttgaaacctcacaatctcttgatggacccaaaaaccatgatgcttaaaattgctgatcttggactcgctcgagcatttactgtgccgattaagaaatatacacatgagatactaaccctgtggtatagagctcctgaagtcctcttgggtgctacccattactcaatggcggtggacatttggtccgtaggctgcatatttgccgaacttgtcaccaaacaagcactctttcctggtgattccgaactgcaacaactcctgcatatattcaggctattgggtactcccaacgaagacgtgtggccaggcgtgagtaaactaatgaactggcatgaataccctcaatggaaccctcaaagtctgtcaacggctgttccaagtttggatgagcttggactggatttgctatcgcaaatgttgaaatatgagccttccaagaggatttctgcaaagaaagcaatggaacatgcttactttgatgacttggacaagaggcacctttag

SEQ ID NO: 338 - protein, 314 aa, Glycine max
MEKPGGGGVLSAKEAFEKLEKVGEGTYGKVYRAREKATGKIVALKKTRLHEDEEGVPPTTLREVSILRMLSRDPHVVRLMDVKQGQNKEGKTVLYLVFEYMDTDLKKFIRSFRQTGQTVPPQTIKSLMYQLCKGVAFCHGHGILHRDLKPHNLLMDPKTMMLKIADLGLARAFTVPIKKYTHEILTLWYRAPEVLLGATHYSMAVDIWSVGCIFAELVTKQALFPGDSELQQLLHIFRLLGTPNEDVWPGVSKLMNWHEYPQWNPQSLSTAVPSLDELGLDLLSQMLKYEPSKRISAKKAMEHAYFDDLDKRHL

SEQ ID NO: 339 - DNA, 672 bp, Helianthus annuus
atggagtccaccaaaacagcaatggaggctttcgagaagctcgagaaggtcggcgaaggaacctacggcaaagtctaccgagccagagacaaaaccaccggcaaaatcgttgctctcaagaaaaccagacttcacgaagacgaagaaggcgtcccccctacaacgcttcgagagatctctatcttacggatgctttcaattgatcctcatgttgtcaagctgatggacgtgaagcaaggcgtgaataagaacggaaacactgtactctacttggtgttcgagtacatggagactgatctgaagaaattcatcagatcctatcgccaaaccggtgacaacattccgccccaaatcgtcaagagcttgatgtaccagctttgcaagggcattgctttctgccatgctcatggtatattacacagggatcttaaaccccacaaccttttgatggatcgaaagacattgatgcttaaaatagcagatcttggacttgctagagcttttactctaccaatcaagaagtacactcatgagattttgaccctttggtatagggctccagaagtacttttgggttctacccattattcaacagctgttgacatgtggtcggttggctgcatatttgctgaattagtcacaaatacagcccatttttgctggagattctga

SEQ ID NO: 340 - protein, 223 aa, Helianthus annuus
MESTKTAMEAFEKLEKVGEGTYGKVYRARDKTTGKIVALKKTRLHEDEEGVPPTTLREISILRMLSIDPHVVKLMDVKQGVNKNGNTVLYLVFEYMETDLKKFIRSYRQTGDNIPPQIVKSLMYQLCKGIAFCHAHGILHRDLKPHNLLMDRKTLMLKIADLGLARAFTLPIKKYTHEILTLWYRAPEVLLGSTHYSTAVDMWSVGCIFAELVTNTAHFCWRF

SEQ ID NO: 341 - DNA, 930 bp, Hordeum vulgare
atggagaagtacgagaagctggagaaggtcggggagggcacctacggcaaggtgtataaggcgatggacaaggcgacgggccaggtggtggcgctcaagaagacccgcctggagatggacgacgaagggatcccgcccaccgcgctccgtgagatctccctcctccgcctcctctccagctccctctacgtcgtccgcctcctcgccgtcgagcagactaccaagggcggcggcgccggcggtggagggaagcccgtcctctacctcgtcttcgagttccttgacactgacctcaagaagttcgtcgacgcctaccgccgtgggcccgcccctaagccactcccaacacatgtcgtcaagagctttttgtatcagttatgcaaaggaattgcacactgccatggacatggtgtccttcatcgggatttaaagccccaaaatctgttggttgacaaggagaagatgatactgaaaattgcagatcttgggttaagtagagcttttactgttcctatgaaaagctacacccatgaaatcgtaacactttggtacagagctcctgaagtactgcttggagcaacacattactcaactggtgttgatatttggtccattggatgcatctttgccgagatggtcagaaaacaggctcttttccctggtgactctgagttacagcaactgcttcacattttcaggctgatgggaactcctaccgaggaggattggcctggagtaactgctctgagggactggcacgagtttcctcagtggaaagcacaaagaatgacgcgtgcagtcccaacactggaaacagaaggaattgacctgctatcgaaaatgctccagtttgacccggcgaacaggatctcagccaaagccgcgctagagcatccctacttcaacagcctcgacaagtctcagttctag

SEQ ID NO: 342 - protein, 309 aa, Hordeum vulgare
MEKYEKLEKVGEGTYGKVYKAMDKATGQVVALKKTRLEMDDEGIPPTALREISLLRLLSSSLYVVRLLAVEQTTKGGGAGGGGKPVLYLVFEFLDTDLKKFVDAYRRGPAPKPLPTHVVKSFLYQLCKGIAHCHGHGVLHRDLKPQNLLVDKEKMILKIADLGLSRAFTVPMKSYTHEIVTLWYRAPEVLLGATHYSTGVDIWSIGCIFAEMVRKQALFPGDSELQQLLHIFRLMGTPTEEDWPGVTALRDWHEFPQWKAQRMTRAVPTLETEGIDLLSKMLQFDPANRISAKAALEHPYFNSLDKSQF

SEQ ID NO: 343 - DNA, 879 bp, Hordeum vulgare
atggcgacgctccagcaccagaaccagggggcggcggcgccgatgaccacgaccggcggcggcctgcgcgccatggacctctacgagaagctggagaaggtcggggagggcacctacgggaaggtgtacaaggcccgggagaaggcgacgggccggatcgtggcgctcaagaagacgcgcctcccggaggacgacgagggtgtgccccccacggcgctcagggaggtctcgctgctgcggatgctgtcgcaggacccgcacgtcgtgcgcctgctcgaccttaagcagggccagaacaaggagggccagaccatcctctacctcgtcttcgagtacatggacaccgacctcaagaagttcatccgcggccaccgccagaaccaccagaagatccctgcccacaccgtcaagatcctgatgtaccagctctgcaagggcgtggctttctgccacggacgcggtgtcctgcaccgtgacctcaagccgcacaacctgctcatggaccgcaagaccatggctctcaagatcgccgatcttgggctcagtcgtgccttcacggttcctctcaagaagtacacgcacgagatccttactctgtggtacagagctcctgaggtccttcttggcgccacacactactccacgcccgttgacatgtggtctgtgggctgcatatttgctgaattgatcactaccacggcacttttccctggagactctgaggtgcagcagctcctgcacattttccagttgttgggcactccaaatgaggaggtctggccaggagtaggcaagctccccaactggcatgagtaccctcagtggaacgtctccaaagctgtcttctgtaattcccagtctcgatgccgttggtattga

SEQ ID NO: 344 - protein, 292 aa, Hordeum vulgare
MATLQHQNQGAAAPMTTTGGGLRAMDLYEKLEKVGEGTYGKVYKAREKATGRIVALKKTRLPEDDEGVPPTALREVSLLRMLSQDPHVVRLLDLKQGQNKEGQTILYLVFEYMDTDLKKFIRGHRQNHQKIPAHTVKILMYQLCKGVAFCHGRGVLHRDLKPHNLLMDRKTMALKIADLGLSRAFTVPLKKYTHEILTLWYRAPEVLLGATHYSTPVDMWSVGCIFAELITTTALFPGDSEVQQLLHIFQLLGTPNEEVWPGVGKLPNWHEYPQWNVSKAVFCNSQSRCRWY

SEQ ID NO: 345 - DNA, 936 bp, Medicago truncatula
atggaaaagtacgaaaaactcgaaaaagttggagaaggaacctatggaaaagtatacaaagcaaaagaaatctccacgggccaaatcgtcgcactcaaaaaaacccgtctcgaaatggacgaagaaggtgttcctccaaccgcacttcgcgaagtttctcttcttcaaatgctctctcaatctctctacatcgttcgtcttctaaacgtcgaacacatcgacaaaccccccaaaaacgctacccacacccccgcaaaaccacttctctatcttgtcttcgagtatctggacaccgatctgaagaaattcattgatacttttcgaaaaggtgttaaccctagaccgttaccgaacacgctggttcagagttttttgtttcagttgtgtaaaggtgttgctcattgtcatagtcatggtgtgttgcatcgtgatttaaaaccgcagaatttgttgctggatcaagcgaaagggattttgaagattgctgatttagggcttggaagagcttttactgtgccgttgaaaagttatactcatgagattgttactctttggtatagagctcctgaggttttgcttggttcttctacttactctactagtgttgatatttggtctgttggatgtatctttgctgaaatggtgagaagacaggctttgtttccaggggattctgaattccagcagcttctgaacatattcaagcttttggggactccaacggatcagcaatggccaggagttagctctctgcgtgattggcatgtctacccaaggtgggagcctcagaacttggcaagggctgttccctcattgtcacctgatggagttgaccttctcacaaaaatgctcaagtacaatcctgctgagagaatatctgccaaagcagcacttgatcatccatactttgacagtcttgacaagtctcaatactaa

SEQ ID NO: 346 - protein, 311 aa, Medicago truncatula
MEKYEKLEKVGEGTYGKVYKAKEISTGQIVALKKTRLEMDEEGVPPTALREVSLLQMLSQSLYIVRLLNVEHIDKPPKNATHTPAKPLLYLVFEYLDTDLKKFIDTFRKGVNPRPLPNTLVQSFLFQLCKGVAHCHSHGVLHRDLKPQNLLLDQAKGILKIADLGLGRAFTVPLKSYTHEIVTLWYRAPEVLLGSSTYSTSVDIWSVGCIFAEMVRRQALFPGDSEFQQLLNIFKLLGTPTDQQWPGVSSLRDWHVYPRWEPQNLARAVPSLSPDGVDLLTKMLKYNPAERISAKAALDHPYFDSLDKSQY

SEQ ID NO: 347 - DNA, 951 bp, Medicago truncatula
atggagaaacctggtgagacaatcgcagtagtgttatctgcgaaggaagcattcgagaagctcgagaaagttggagaaggaacgtacgggaaggtttacagagcaagagagaaagctactgggaaaattgttgcgttgaagaagactcgtcttcatgaagatgatgaaggtgttcctcctactacgcttcgcgaggtttcgattctgagaatgctctctcgcgatccacatgttgttaggttgttggatgtgaaacaagggcagaacaaagaagggaaaactgtgttgtatttagtttttgagtatatggatactgatcttaagaaattcattcggagttttcgtcaaactgggcaaaatattccacccccaaccatcaaaggtttgatgtatcaactttgcaagggtgttgctttctgccatggtcatggaattttgcacagggatttgaagcctcacaatctcttgatggaccggaaaacaatgatgctcaaaattgctgatcttggacttgctagagcttttactgtaccacttaagaagtacactcatgagatactaaccctgtggtatagagcacctgaagtccttttgggggctacccattactcaatggctgtggatatgtggtctgttgcctgcattttcgctgaacttgttaccaagacagcactatttcctggtgattctgagctgcaacaactcctccatatattcaggctgttggggactcctaatgaagatgtgtggccaggtgttagtaaactaatgaactggcatgagtaccctcagtggggtcctcaaagtctttcaaaggctgttcccggtttggaagaggctggagtggatttactctctcaaatgctgcaatatgagccctccaagcggctatctgcaaagaaagctatggaacacccttactttgatgacctggacaagacccatctttag

SEQ ID NO: 348 - protein, 316 aa, Medicago truncatula
MEKPGETIAVVLSAKEAFEKLEKVGEGTYGKVYRAREKATGKIVALKKTRLHEDDEGVPPTTLREVSILRMLSRDPHVVRLLDVKQGQNKEGKTVLYLVFEYMDTDLKKFIRSFRQTGQNIPPPTIKGLMYQLCKGVAFCHGHGILHRDLKPHNLLMDRKTMMLKIADLGLARAFTVPLKKYTHEILTLWYRAPEVLLGATHYSMAVDMWSVACIFAELVTKTALFPGDSELQQLLHIFRLLGTPNEDVWPGVSKLMNWHEYPQWGPQSLSKAVPGLEEAGVDLLSQMLQYEPSKRLSAKKAMEHPYFDDLDKTHL

SEQ ID NO: 349 - DNA, 912 bp, Oryza sativa
atggagaagtacgagaagctggagaaggtgggggaagggacgtacgggaaggtgtacaaggcgcaggacagggcgacggggcagctggtggcgctgaagaagacgaggctggagatggacgaggaggggatcccgcccaccgcgctgcgcgagatctccatcctcaggctgctctcccagtcgctctacgtcgtccgcctcctctccgtcgagcaggccaccaagaacggcaagcccgtcctctacctcgtcttcgagttcctcgacaccgacctcaagaagttcgtcgacgcctaccgcaagggccccaaccctcgccccctccccaccaacgtcatcaagagcttcttgtatcagttatgcaaaggagtcgcacattgccatggccatggtgtccttcaccgtgatttaaagccacaaaacctgttggtcgacaaggaaaaggggatattgaaaattgctgatcttgggctaggtagggcgttcactgttcctatgaaaagctacacacatgagattgtgactctttggtacagagctcctgaagttttgcttggatcaacacattactcaaccggtgttgacatttggtccgttggttgcatcttcgctgaaatggtcagaagacaagctctttttccaggtgactctgagttgcaacagttgcttcacattttcaggttgttgggaactcctactgaggagcagtggcctggagtaactgatttgagggactggcatgagtttccacagtggaagccacagattttagaacgtcaagtcccatcattggagcctgaaggagttgaccttttatcgaaaatgctccagtataacccagcaaatcggatctcagcaaaggctgctatggaacacccctacttcgacagcctcgacaagtcccagttctag

SEQ ID NO: 350 - protein, 303 aa, Oryza sativa
MEKYEKLEKVGEGTYGKVYKAQDRATGQLVALKKTRLEMDEEGIPPTALREISILRLLSQSLYVVRLLSVEQATKNGKPVLYLVFEFLDTDLKKFVDAYRKGPNPRPLPTNVIKSFLYQLCKGVAHCHGHGVLHRDLKPQNLLVDKEKGILKIADLGLGRAFTVPMKSYTHEIVTLWYRAPEVLLGSTHYSTGVDIWSVGCIFAEMVRRQALFPGDSELQQLLHIFRLLGTPTEEQWPGVTDLRDWHEFPQWKPQILERQVPSLEPEGVDLLSKMLQYNPANRISAKAAMEHPYFDSLDKSQF

SEQ ID NO: 351 - DNA, 981 bp, Oryza sativa
atggcggcgctccaccaccaggcggcggcggcgccggtgacgacgacgacggacgggggcgagctgcgggcgatggacctgtacgagaagctggagaaggtcggggaggggacgtacgggaaggtgtacaaggcgcgggagaaggcgacggggcggatcgtggcgctgaagaagacgcggctgccggaggacgacgagggcgtgccgccgacggcgctcagggaggtgtcgctgctgcggatgctgtcgcaggactcgcacgtggtgcgcctgctggacctcaagcaggggcagaacaaggagggccagaccatcctctacctcgtcttcgagtacatggacaccgacctcaagaagttcatccgcgcccaccgccagaatctccagaagatccccgtgcccaccgtcaagatcctgatgtaccagctctgcaagggcgttgctttctgccatggccgcggtgtgctgcaccgtgacctcaagccgcataacctgctcatggaccgcaagaccatggcgctcaagatcgccgacctcgggctcagccgctcgttcactgtccctctcaagaagtacacccacgagatcctgacgctgtggtacagggctcccgaggttcttcttggcgcggcacactactccactccggttgacatctggtctgtgggctgcatttttgctgagttggccactaaccaacctcttttcgctggagattccgaggttcagcagcttctgcacattttcaagttgctgggcaccccaaatgagcaagtttggccaggagtgagcaagctacctaactggcacgagtacccccagtggaatccctcgaaagtgtctgatcttgtccatggtctcgacgctgatgctcttgatcttcttgagaaaatgctgcagtacgagccgtcgaagcggatctctgcgaagaaggccatggagcatccctacttcaacgacgtgaacaaggagctctactga

SEQ ID NO: 352 - protein, 326 aa, Oryza sativa
MAALHHQAAAAPVTTTTDGGELRAMDLYEKLEKVGEGTYGKVYKAREKATGRIVALKKTRLPEDDEGVPPTALREVSLLRMLSQDSHVVRLLDLKQGQNKEGQTILYLVFEYMDTDLKKFIRAHRQNLQKIPVPTVKILMYQLCKGVAFCHGRGVLHRDLKPHNLLMDRKTMALKIADLGLSRSFTVPLKKYTHEILTLWYRAPEVLLGAAHYSTPVDIWSVGCIFAELATNQPLFAGDSEVQQLLHIFKLLGTPNEQVWPGVSKLPNWHEYPQWNPSKVSDLVHGLDADALDLLEKMLQYEPSKRISAKKAMEHPYFNDVNKELY

SEQ ID NO: 353 - DNA, 927 bp, Physcomitrella patens
atgtctgtttctggtatggacaactatgagaagctggagaaggtaggagaggggacttacggaaaggtgtataaggcccgtgataaacgctccgggcagctggtggcgctcaagaagactaggttggagatggaggaagaaggcgtcccttccaccgctttgcgcgaagtttcgttgctacaaatgctctcccacagcatgtatatcgtcaggctactttgcgtggagcacgtcgagaaaggcggcaagcccatgctctacttggtctttgaatatatggacactgatcttaagaagtatattgacttgcacggtcgtggtccgagcgggaagcctctgcctcccaaagtggtccagagtttcatgtatcaattgtgcacagggcttgcccactgtcatggccacggagtaatgcacagggatctgaaaccccagaatttgctcgtcgacaagcaaacccgtcgtcttaagattgccgaccttggtctcggtcgggcattcacagtgccaatgaagagttacacacacgagattgttactctatggtaccgagctcctgaagttcttcttggagcgacccactactctctacctgtggatatctggtctgttgggtgcatcttcgctgaactcgtccggaaaatgccgctcttcactggagactccgaacttcagcagcttcttcacatcttcaggttgcttggcaccccgaatgagacaatctggcctggtgttagccagcaccgtgattggcacgagtttcctcaatggagaccacaagatctgtcccttgctgttcccggactcagcgcggttggcttagaccttctcgccaaaatgttggtattcgagccctcaaagagaatctctgccaaagccgccttgagccatacttatttcgctgatgttgataagacagcaacctaa

SEQ ID NO: 354 - protein, 308 aa, Physcomitrella patens
MSVSGMDNYEKLEKVGEGTYGKVYKARDKRSGQLVALKKTRLEMEEEGVPSTALREVSLLQMLSHSMYIVRLLCVEHVEKGGKPMLYLVFEYMDTDLKKYIDLHGRGPSGKPLPPKVVQSFMYQLCTGLAHCHGHGVMHRDLKPQNLLVDKQTRRLKIADLGLGRAFTVPMKSYTHEIVTLWYRAPEVLLGATHYSLPVDIWSVGCIFAELVRKMPLFTGDSELQQLLHIFRLLGTPNETIWPGVSQHRDWHEFPQWRPQDLSLAVPGLSAVGLDLLAKMLVFEPSKRISAKAALSHTYFADVDKTAT

SEQ ID NO: 355 - DNA, 909 bp, Physcomitrella patens
atggagaactatgagaagctagagaagatcggcgaaggaatgtatgggaaagtgtacaaggcgcgtgacagaagaacaggggcgctggtggcgctgaagaagattaagatagagaatgaggaggaaggcattcctgctacgacattgcgagaagtatctctgttgcaaatgctttctaagtgcatctacttcgttcggttattaggcgtggagcatttacacaagaatgggaagccagcgttgtacctggtttttgagtacattgatacagacctcagaaggtttttggatctgtcgtggccgggcctggacaacccacttcctcaaaatacgattaagagctttgtgtaccaattgctgaaaggggttgctcattgccacagccacggagtaatgcacagagatttgaagcctcagaacctcctcgtcgattggagcaagggtctgttaaaaattgcggatctgggcttaggaagggccttcactgttccggtcaagagctacacccacgaggttgtcacgctgtggtaccgtgcccccgaaatcctgctgggagcctctcattattcaacacccgtggacatgtggtctgtaggatgtatatttgctgagttgtgtcgcaagacgcctctgtttccagggaattctgaactccagcaacttctctacatttttcggttattaggaacaccaaatgagcaagtatggcctggtgtaactacactacgggactggcatgcctacccacagtggagagctcacgacattgcacaagctgtgccaggaatcgaaccaagtggtgtcgatcttctcgatcgcatgttgcaatacaacccagcgaatcgaatttcagccaaggaagctctgatccacccttattttgataacctcgacaagtcgcagtattaa

SEQ ID NO: 356 - protein, 302 aa, Physcomitrella patens
MENYEKLEKIGEGMYGKVYKARDRRTGALVALKKIKIENEEEGIPATTLREVSLLQMLSKCIYFVRLLGVEHLHKNGKPALYLVFEYIDTDLRRFLDLSWPGLDNPLPQNTIKSFVYQLLKGVAHCHSHGVMHRDLKPQNLLVDWSKGLLKIADLGLGRAFTVPVKSYTHEVVTLWYRAPEILLGASHYSTPVDMWSVGCIFAELCRKTPLFPGNSELQQLLYIFRLLGTPNEQVWPGVTTLRDWHAYPQWRAHDIAQAVPGIEPSGVDLLDRMLQYNPANRISAKEALIHPYFDNLDKSQY

SEQ ID NO: 357 - DNA, 909 bp, Physcomitrella patens
atggacgaatacgagaagctggagaagatcggggagggtacctacgggaaagtgtacaaagcgaggaacaagagcacaggtcgcctagtggcgctcaagaaaaccaggcttgaaatggaggatgaaggagtaccatcaactgctcttcgagaggtttcactcttgcagatgctttcacatagcatctacattgtcaggttgttatctgtggaaagcgtagatgagaatgggaaacctcaactgtatttggtttttgagtaccttgacagtgatctcaagaaattcatcgattcgtacggccgaggtagtggcaatcctattcccgcgaaaactattcagagctttatgtatcaacttctgaaaggcgttgcgcactgccatggtcatggtgttatgcatcgggatctgaagccacagaacttgcttgtggacaaagaaaagggtttgcttaaaattgctgatttgggtctgggaagagcgttcactattcctttaaagagctacactcacgagattgttactctctggtaccgtgctccggaggttttgcttggttccagtcagtactccacatccgtggatatgtggtctgtggggtgcatatttgctgaactatctcgcaaagctcctctcttcccaggggattcggaattacagcaactcctgcatatattcaggctgcttggtactccaacggaggaatcatggcctggtgtgaaaaagctgcgggactggcatgagtatcctcaatggcaacctcaaaacctgtcacgagctgtgccggatatgggccctgaagctctagaccttctaactagaatgttgatgttcgatcctgcaaagcgtgtctcagccaaggcagccttgaaccatcctttctttgatgatctggacaagtctcaattttga

SEQ ID NO: 358 - protein, 302 aa, Physcomitrella patens
MDEYEKLEKIGEGTYGKVYKARNKSTGRLVALKKTRLEMEDEGVPSTALREVSLLQMLSHSIYIVRLLSVESVDENGKPQLYLVFEYLDSDLKKFIDSYGRGSGNPIPAKTIQSFMYQLLKGVAHCHGHGVMHRDLKPQNLLVDKEKGLLKIADLGLGRAFTIPLKSYTHEIVTLWYRAPEVLLGSSQYSTSVDMWSVGCIFAELSRKAPLFPGDSELQQLLHIFRLLGTPTEESWPGVKKLRDWHEYPQWQPQNLSRAVPDMGPEALDLLTRMLMFDPAKRVSAKAALNHPFFDDLDKSQF

SEQ ID NO: 359 - DNA, 912 bp, Physcomitrella patens
atggatgggtatgaaaagctggaaaaggttggggaggggacctacggtaaagtgtacaaagcaagggacaagaggacaggtcgatttgtcgcgctcaaaaaaactaggctggaaaacgaggatgaaggagtcccttcgacgactcttcgagaggtttccctcttgcaaatgctttctcatagcatctacattgtcaggttgttatgcgtggaaagtgtagatgaaaatgggaaaccccaactatacttggtctttgagtacctcgacagtgatctcaagaaatatattgacttgcatggccgaggccctggcaccaaccctattccggcaaagactgttcagagctttatgtatcaactcctgaaaggcgttgcgcattgccatagtcatggtgtgatgcatcgggacttgaagccacagaatttgctagtggacaaagagaagggtttgcttaaaattgctgatttgggtttgggcagggcgtttacggtgcctctcaagagctacactcatgagattgtcacgctatggtatcgagctccggaggtcttgctgggagccagtcattactccacgtctgtggatgtgtggtctgtgggctgcatatttgctgaattgtctcgcaaggcccctctctttcccggagactcagaattgcagcaactcctccatatattcaggatgcttggtacgcctaaggaagaatgctggcctggagtgaataagcttcgagactggcatgaatacccacaatggcccgctaaagacctatcactagctgtaccagacatgagccctgatgctctggatcttctctctagaatgctggtgttcgaccctgccaagcgtatctcagctaaagcggctttgcaccacccattctttgacgaccttgacaagtcccaattttaa

SEQ ID NO: 360 - protein, 303 aa, Physcomitrella patens
MDGYEKLEKVGEGTYGKVYKARDKRTGRFVALKKTRLENEDEGVPSTTLREVSLLQMLSHSIYIVRLLCVESVDENGKPQLYLVFEYLDSDLKKYIDLHGRGPGTNPIPAKTVQSFMYQLLKGVAHCHSHGVMHRDLKPQNLLVDKEKGLLKIADLGLGRAFTVPLKSYTHEIVTLWYRAPEVLLGASHYSTSVDVWSVGCIFAELSRKAPLFPGDSELQQLLHIFRMLGTPKEECWPGVNKLRDWHEYPQWPAKDLSLAVPDMSPDALDLLSRMLVFDPAKRISAKAALHHPFFDDLDKSQF

SEQ ID NO: 361 - DNA, 801 bp, Physcomitrella patens
  misc_feature (545)..(545): n is a, c, g, or t
atggacaagtacgagaagctggagaaagttggtgagggcacttatggaaaggtgtacaaggctcgggataagctcacagggcagctggtggcgctgaaaaagactaggttggagatggaagaagagggcgttccttctacggctcttcgtgaagtctccttactgcaaatgctctcgcatagcatatacattgttaggcttctttgtgtggagcacgtcgagaagggtggcaagcccatgctctacttggtctttgagtacatggatacagatctgaagaagtacattgacttgcacggtcgtggtccgagcgggaaacctttaccgcccaaagttgtgcagagctttatgtaccagttgtgcacagggcttgcgcactgccatggccacggagttatgcacagggatcttaagccccagaacttattggtggacaagcaaactcggcgtctcaagattgccgaccttggttttggtcgagctttcacggtgccaatgaagagttatactcacgagatcgtcacactgtggtaccgagctcccgnagttttctcggagcaacccactactcccttcctgttgatatttggtctgttggatgtattttcgctgagctcgttcgcaaaatgccgctcttcaccggggattcagaacttcaacagctcctccacatcttcaggctacttggcacaccgaatgaaacgatttggcccggggttagccagcatcgtgattggcacgagttcccgcagtggaggccccaagagttatctctggcggttcctggtctatgcgcagtag

SEQ ID NO: 362 - protein, 266 aa, Physcomitrella patens
  misc_feature (182)..(182): Xaa can be any naturally occurring amino acid
MDKYEKLEKVGEGTYGKVYKARDKLTGQLVALKKTRLEMEEEGVPSTALREVSLLQMLSHSIYIVRLLCVEHVEKGGKPMLYLVFEYMDTDLKKYIDLHGRGPSGKPLPPKVVQSFMYQLCTGLAHCHGHGVMHRDLKPQNLLVDKQTRRLKIADLGFGRAFTVPMKSYTHEIVTLWYRAPXVFSEQPTTPFLLIFGLLDVFSLSSFAKCRSSPGIQNFNSSSTSSGYLAHRMKRFGPGLASIVIGTSSRSGGPKSYLWRFLVYAQ

SEQ ID NO: 363 - DNA, 909 bp, Physcomitrella patens
atggagaactacgagaagatagagaagattggggagggaatgtatgggaaagtgtataaggcctgggataagaggacaggagcgatggtggcgctgaaaaagaataagatagagaacgagaaggagggtattcctgccacgacgttgcgagaagtatctctcttgcaagtgctctctacgtgcatctacttcgttcgattattgagtgtggagaattcgcacaagaatggaaagacatcgttgttcatggttttcgagtacattgatacagacctgagaaggtttatggatttatcttggccaggccctgacaacccgcttcctcaaaacaccatcaaaagcttcatgttccaattgctgaaaggagttgctcattgccacagccacggaatcatgcacagggatctgaagccccaaaacctcctcgttgattggaaaaagggcctcttaaaaattgcggatttaggactaggaagggctttcactgtcccaatgaagagctatacccatgaggttgttacactatggtatcgtgctcctgaaattctgctgggagcctcacattattcaacgcccgtggacatgtggtctgtaggatgtgtatttgctgagctgtgtcggaagtcgcctctatttccaggaaattctgaacttcagcaacttctcttcatttttcggttgttgggaacgccaaatgagcaaatatggccaggtgtaactactctgcggaactggcattcttacccgcagtggaagcctcacgagattgcacaagctgtgccaagagtcgaacgaagtggtgtcgatctcctcgatcgcttgttgcaatacaacccagcgaatcgaatttcagctaaggaagctctagtccacccctattttgacagccttgacaaatcacagttttga

SEQ ID NO: 364 - protein, 302 aa, Physcomitrella patens
MENYEKIEKIGEGMYGKVYKAWDKRTGAMVALKKNKIENEKEGIPATTLREVSLLQVLSTCIYFVRLLSVENSHKNGKTSLFMVFEYIDTDLRRFMDLSWPGPDNPLPQNTIKSFMFQLLKGVAHCHSHGIMHRDLKPQNLLVDWKKGLLKIADLGLGRAFTVPMKSYTHEVVTLWYRAPEILLGASHYSTPVDMWSVGCVFAELCRKSPLFPGNSELQQLLFIFRLLGTPNEQIWPGVTTLRNWHSYPQWKPHEIAQAVPRVERSGVDLLDRLLQYNPANRISAKEALVHPYFDSLDKSQF

SEQ ID NO: 365 - DNA, 969 bp, Populus trichocarpa
atggaaaagtatgagaaactggagaaggtaggcgaaggcacatacggcaaagtgtacaaagccaaagacaaagtaacagggcaaatagtcgccctcaagaaaacacgacttgaaatggacgaagaaggcgttcctcctaccgctcttcgcgaggtttctctccttcaaatgctctctcaatctctctacgtcgtccgcctcctctccgtcgaacacgttgacgccaatagcaccaactccaatcttgatgactccaatccctctaagcgcaaccacaacaacaacaacaaatccaatctctacttggttttcgaatatctcgacacggatctcaagaaattcatcgattctcaccgcaaaggtgccaaccctaggcctctctcgccttcgctgatacagagttttctcttccagctttgcaagggagttgctcactgtcacagccacggtgtgcttcaccgcgatctcaagcctcagaatctgcttcttgatcaggagaaagggattcttaagattgctgatttgggattaggtcgtgcttttaccgtgcctcttaagagttatacccacgagattgttactctttggtatagggctcccgaggtgttgcttggttccactcattattccactggcgtcgatatgtggtccgtcggttgcatcttcgctgaaatgtcaagaaggcaagctctgtttcccggtgactcagagtttcaacagttgcttcatattttcaggttgctgggaacaccgactgaagagcagtggccaggagttactgctctcagagattggcatgtctatccgaaatgggagcctcaaaaccttgcacgggttgtccagtcactgggacctgaaggggtggacctcttatcgaagatgctcaagtatgatccagctgaaaggatctcggccaaagcagccatggatcatccctatttcgacagccttgacaagtctcaattctga

SEQ ID NO: 366 - protein, 322 aa, Populus trichocarpa
MEKYEKLEKVGEGTYGKVYKAKDKVTGQIVALKKTRLEMDEEGVPPTALREVSLLQMLSQSLYVVRLLSVEHVDANSTNSNLDDSNPSKRNHNNNNKSNLYLVFEYLDTDLKKFIDSHRKGANPRPLSPSLIQSFLFQLCKGVAHCHSHGVLHRDLKPQNLLLDQEKGILKIADLGLGRAFTVPLKSYTHEIVTLWYRAPEVLLGSTHYSTGVDMWSVGCIFAEMSRRQALFPGDSEFQQLLHIFRLLGTPTEEQWPGVTALRDWHVYPKWEPQNLARVVQSLGPEGVDLLSKMLKYDPAERISAKAAMDHPYFDSLDKSQF

SEQ ID NO: 367 - DNA, 909 bp, Populus trichocarpa
atggaaaagtatgagaaactggagaaggtcggggaaggcacctacggcaaagtctataaagccaaagacaaactaacaggtcagctcgttgctctcaaaaaaactcggctccaaatggatgaggaaggcgttccccctaccgctctccgcgaagtttctcttcttcagatgctctctcaatctctctacgtcgtccgcctcctctcagtcgaacaccttgacgccaacaactccgacgacgactccaaatccaatctctacttggttttcgagtttctcgatgcggatctcaagaaattcatcgattctcaccgcaaaggtcccaaccctagacctctctccccttccctcatccagagcttcctcttccagctctgcaagggagttgctcactgtcacagccacggtgtgcttcaccgcgatctcaagcctcagaaccttcttcttgatcaggagagaggtattcttaagattgctgatttgggattgggtcgtgcctttactgtgcctcttaagagttatacccatgagattgtcactctttggtatagggctcctgaggtgttgcttggttccactcattattccatcgctatcgatatgtggtctgtcggttgcatctttgctgaaatgtcgagaaggcaagctctgtttcctggagactccgagcttcaacagttgttaggaacaccaactgaagagcagtggccaggagttacttctcttagagattggcatgtctatcccaaatgggagcctcaaaaccttgcacgagctgttccatctcttggacctcaaggggtggacctcttatcgaagatgctcaagtacgatccagctgaaagaatctcggccaaagcagctatggatcatccctatttcgacagccttgacaagtcgcagttctga

SEQ ID NO: 368 - protein, 302 aa, Populus trichocarpa
MEKYEKLEKVGEGTYGKVYKAKDKLTGQLVALKKTRLQMDEEGVPPTALREVSLLQMLSQSLYVVRLLSVEHLDANNSDDDSKSNLYLVFEFLDADLKKFIDSHRKGPNPRPLSPSLIQSFLFQLCKGVAHCHSHGVLHRDLKPQNLLLDQERGILKIADLGLGRAFTVPLKSYTHEIVTLWYRAPEVLLGSTHYSIAIDMWSVGCIFAEMSRRQALFPGDSELQQLLGTPTEEQWPGVTSLRDWHVYPKWEPQNLARAVPSLGPQGVDLLSKMLKYDPAERISAKAAMDHPYFDSLDKSQF

SEQ ID NO: 369 - DNA, 966 bp, Populus trichocarpa
atggaaaaggcaggaggagtagtagcagcagcaccaacgaacacggtggtgtcggcgatggatgcattcgagaagctagagaaagtaggagagggaacgtacggtaaagtgtacagagcaagggagagagccactggaaagatcgttgctctcaaaaagacacgtctccatgaagacgatgaaggagtcccaaccaccactcttcgtgaagtctccatcttgcgtatgctctccagagatcctcacgtcgtccgtttgatggacgtgaaacaagggcagaataagcaaggcaagacagttctgtatctggtttttgagtacatggacaccgatctcaagaaatttatccgaagcttcctccaaactggagagaacattcctgtcaaaaatgtgaagagcttgatgtatcaattgtgcaagggtgtggctttctgccatggccatggagtcttacacagggatcttaagcctcataacctgttgatggaccgcaagacaatgatgcttaaaatagctgatcttggactagctcgagcatttacacttcctattaagaagtatacccatgagatattgactttgtggtatagagctcctgaagtccttctgggggctacccattactcaactgcagtggatgtatggtctgttggctgtatatttgctgaactggccacaaagcaaccactcttccctggagactctgaactacaacagctcctgcatattttcaggttattaggtactccaaatgaagaaatgtggccaggagtaagcaacctgatgaactggcatgagtatccccaatggaaacctcagagcttgtcgtcatctgtaactaatttggacaaggatgggctggatctactatcacaaatgttgcagtatgacccttcaaagcgtatctcagcaaagaaagccatggaacatccttactttgatgaattggagaaggaatgtctctaa

SEQ ID NO: 370 - protein, 321 aa, Populus trichocarpa
MEKAGGVVAAAPTNTVVSAMDAFEKLEKVGEGTYGKVYRARERATGKIVALKKTRLHEDDEGVPTTTLREVSILRMLSRDPHVVRLMDVKQGQNKQGKTVLYLVFEYMDTDLKKFIRSFLQTGENIPVKNVKSLMYQLCKGVAFCHGHGVLHRDLKPHNLLMDRKTMMLKIADLGLARAFTLPIKKYTHEILTLWYRAPEVLLGATHYSTAVDVWSVGCIFAELATKQPLFPGDSELQQLLHIFRLLGTPNEEMWPGVSNLMNWHEYPQWKPQSLSSSVTNLDKDGLDLLSQMLQYDPSKRISAKKAMEHPYFDELEKECL

SEQ ID NO: 371 - DNA, 927 bp, Populus trichocarpa
atggaaaagtatgagaaactggagaaggtcggggaaggcacctacggcaaagtctataaagccaaagacaaactaacaggtcagctcgttgctctcaaaaaaactcggctccaaatggatgaggaaggcgttccccctaccgctctccgcgaagtttctcttcttcagatgctctctcaatctctctacgtcgtccgcctcctctcagtcgaacacattgacgccaacaactccgacgacgactccaaatccaatctctacttggttttcgagtttctcgatgcggatctcaagaaattcatcgattctcaccgcaaaggtcccaaccctagacctctctccccttccctcatccagagcttcctcttccagctctgcaagggagttgctcactgtcacagccacggtgtgcttcaccgcgatctcaagcctcagaaccttcttcttgatcaggagagagggattcttaagattgctgatttgggattgggtcgtgcctttactgtgcctcttaagagttatacccatgagattgtcactctttggtatagggctcctgaggtgttgcttggttccactcattattccatcgctatcgatatgtggtctgtcggttgcatctttgctgaaatgtcgagaaggcaagctctgtttcctggagactccgagcttcaacagttgcttcatattttcaggttgttaggaacaccaactgaagagcagtggccaggagttacttctcttagagattggcatgtctatcccaaatgggagcctcaaaaccttgcacgagctgttccatctcttggacctcaaggggtggacctcttatcgaagatgctcaagtacgatccagctgaaagaatctcggccaaagcagctatggatcatccctatttcgacagccttgacaagtcgcagttctga

SEQ ID NO: 372 - protein, 308 aa, Populus trichocarpa
MEKYEKLEKVGEGTYGKVYKAKDKLTGQLVALKKTRLQMDEEGVPPTALREVSLLQMLSQSLYVVRLLSVEHIDANNSDDDSKSNLYLVFEFLDADLKKFIDSHRKGPNPRPLSPSLIQSFLFQLCKGVAHCHSHGVLHRDLKPQNLLLDQERGILKIADLGLGRAFTVPLKSYTHEIVTLWYRAPEVLLGSTHYSIAIDMWSVGCIFAEMSRRQALFPGDSELQQLLHIFRLLGTPTEEQWPGVTSLRDWHVYPKWEPQNLARAVPSLGPQGVDLLSKMLKYDPAERISAKAAMDHPYFDSLDKSQF

SEQ ID NO: 373 - DNA, 912 bp, Solanum lycopersicum
atggagaaatacgagaaattggagaaggtaggtgaaggaacctatggaaaagtgtacaaagcaaaggacaaggctaccggacaattggtggctttgaagaagactcgtcttgaaatggatgaagaagggataccgcctactgctctcagagagatctcacttcttcaaatgctatctcattctctctacatcgtccgtttgctttgtgttgaacatattgacaaaaatgggaaaccaattctttatcttgtttttgagtatttggatactgatcttaagaaattcattgattctcatcggaaaggacctaatgctagggctcttcctactgccctcatccagagttttttgtttcaattgtgcaaaggggttgctcactgccatagccatggagttctccacagagatttgaagccgcagaatcttctagtggataaagagaagggaatacttaagattgctgatctggggcttggaagggcgtttactgttcctatgaagagctacacccatgagattgttactctatggtacagagctcctgaagttttgttgggatctactcattactcaactgctgttgatatgtggtctgtgggatgtatttttgccgagatggttagaaggcaagccttatttcctggtgactctgagttccagcaattgcttcacatattcaggttgttaggaactccaactgataagcagtggcctggagtgagttcactccgcgactggcatgtttatccacaatgggagcctcagaacttggcctctgctgttccagcattgggacctgatggtgtcgacctcctaacgaaaatgctcaaatttgatccatcagataggatttctgcgaaagctgcacttgatcatccatactttgacagcttggacaagtctcaattctga

SEQ ID NO: 374 - protein, 303 aa, Solanum lycopersicum
MEKYEKLEKVGEGTYGKVYKAKDKATGQLVALKKTRLEMDEEGIPPTALREISLLQMLSHSLYIVRLLCVEHIDKNGKPILYLVFEYLDTDLKKFIDSHRKGPNARALPTALIQSFLFQLCKGVAHCHSHGVLHRDLKPQNLLVDKEKGILKIADLGLGRAFTVPMKSYTHEIVTLWYRAPEVLLGSTHYSTAVDMWSVGCIFAEMVRRQALFPGDSEFQQLLHIFRLLGTPTDKQWPGVSSLRDWHVYPQWEPQNLASAVPALGPDGVDLLTKMLKFDPSDRISAKAALDHPYFDSLDKSQF

SEQ ID NO: 375 - DNA, 948 bp, Solanum lycopersicum
atggaggctgctaaaaatgctggtaagagtgtatcggcgatggaggcatttgagaagctggagaaggttggggagggtacctatggaaaggtgtacagagcgagagataggattactggcaagattgttgcactgaagaagacaaggcttcatgaggacgaagaaggtgttcctccaactactctccgggagatctcactcctcaaaatgctctcaagggatccccacattgtcaggctgatggatgttaaacaagggcagaacaaagaaggaaagactgttctttacttggtctttgagtacatggatactgatgtcaagaaatttattcgtactttccgtgcaaaaggagaaactatgccccttaaaattgtaaagagcttgatgtaccaactctgcaaaggggttgctttctgccatggccatggcgtattgcacagggatctgaaaccacacaatcttctgatggaccgtaagacgaatgtgctcaaattagcagattttggacttggcagagcttatactctgcccattaagaagtacacacatgagatattaaccctgtggtatagagcccctgaggttctacttggagctactcattattccacagcagttgacatgtggtctgttggttgtatatttgctgaactagtgacaaaccaagccctcttcccaggagactctgagctgcaacaactgcttcacattttcagattgctaggtactcctaatgaagaactctggcctggggtgagcaagttagttaactggcatgaatacccccagtggaaaccacagccactctcaaccgttgtccctggtcttgatgaagatgggattcaccttctcagtgagatgttgcattatgagccgtctaggaggatttcagctaagaaagctatggaacatccctattttgatgatctcgacaaaactcctctctga

SEQ ID NO: 376 - protein, 315 aa, Solanum lycopersicum
MEAAKNAGKSVSAMEAFEKLEKVGEGTYGKVYRARDRITGKIVALKKTRLHEDEEGVPPTTLREISLLKMLSRDPHIVRLMDVKQGQNKEGKTVLYLVFEYMDTDVKKFIRTFRAKGETMPLKIVKSLMYQLCKGVAFCHGHGVLHRDLKPHNLLMDRKTNVLKLADFGLGRAYTLPIKKYTHEILTLWYRAPEVLLGATHYSTAVDMWSVGCIFAELVTNQALFPGDSELQQLLHIFRLLGTPNEELWPGVSKLVNWHEYPQWKPQPLSTVVPGLDEDGIHLLSEMLHYEPSRRISAKKAMEHPYFDDLDKTPL

SEQ ID NO: 377 - DNA, 975 bp, Triticum aestivum
  misc_feature (641)..(641): n is a, c, g, or t
atggagaagtacgagaagctggagaaggtcggggagggcacctacggcaaggtgtacaaggcgcaggacaaggcgacgggccaggtggtggcgctcaagaagacccgcctggagatggacgacgaagggatcccgcccaccgcgctccgtgagatctccctcctccgcctcctctccagctccctctacgtcgtccgcctcctcgccgtcgagcaggccaccaagggcggcggcgccggcagtggagggaagcccgtcctctacctcgtcttcgagtttcttgacactgacctcaagaagttcgtcgacgcctaccgccgtgggcccgcccctaagccgctcccaacgcaggtcgtcaagagtttcttgtatcagttatgcaaaggaattgcacactgccatggccatggggtccttcatcgggatttaaagccccaaaatctattggttgacaaggagaagatgatactgaaaattgcagatcttgggttaagtagagcttttactgttcctatgaaaagctacacccatgagatcgtgacgctttggtatagagctcctgaagtactgcttggagcaacacattactcaaccagtgttgatatttggtccatcggatgcatctttgccgagatggtcanaaaacaggctcttttccctggtgactctgagttacagcaactgcttcacattttcaagctgttgggaaactcctaccgaggaggattggcctggagtaactgctctgagggactggcacgagtttcctcagtggaaagcactgaacccagaaggaatgacctgttatctgaaatgttccaattcgacccggggaaaaggatttcagccaaagttgggctgaagatccctttttcaacagcctcaacagttcagtcttggcggtctacctccgggggattttcccacatgggtgggtggctgggcccccacttttccgcctgggaatatgtttaa

SEQ ID NO: 378 - protein, 324 aa, Triticum aestivum
  misc_feature (214)..(214): Xaa can be any naturally occurring amino acid
MEKYEKLEKVGEGTYGKVYKAQDKATGQVVALKKTRLEMDDEGIPPTALREISLLRLLSSSLYVVRLLAVEQATKGGGAGSGGKPVLYLVFEFLDTDLKKFVDAYRRGPAPKPLPTQVVKSFLYQLCKGIAHCHGHGVLHRDLKPQNLLVDKEKMILKIADLGLSRAFTVPMKSYTHEIVTLWYRAPEVLLGATHYSTSVDIWSIGCIFAEMVXKQALFPGDSELQQLLHIFKLLGNSYRGGLAWSNCSEGLARVSSVESTEPRRNDLLSEMFQFDPGKRISAKVGLKIPFSTASTVQSWRSTSGGFSHMGGWLGPHFSAWEYV

SEQ ID NO: 379 - DNA, 915 bp, Triticum aestivum
atggagaagtacgagaagctggagaaggtgggggagggcacctacggcaaggtgtacaaggcgcgggtggcggcgacggggcagctggtggcgctcaagaagacccgcctcgagatggacgaggaggggatcccgcccacggcgctgcgcgagatctccctcctccgcctcctctccgcctccctctacgtcgtccgcctcctctccgtggagcaggtcaccaagccctgcggcaagaccgtcctctacctcgtcttcgagttcctcgacaccgacctcaagaagttcgtcgacggcttccgcaaggggccctcgcccaggccggttcccacccaggtcgtcaagagtttcttgtaccagttatgcaaaggaactgcgcattgccatggccatggcgtccttcaccgggatttaaagccacaaaacttgttgatcgacaaggagaaaggggtactgaaaattgccgatcttgggctaagcagagcttttactgttcccatgaaaagttacacccatgagattgtgacactctggtatagagctcctgaagttttacttggagccacacattactcaactggtgttgacatttggtccatcggttgcatctttgctgaaatggtcagaagacaagctctttttcctggcgactccgagttgcaacagctgcttcacattttcaggttgttggggactcctaatgaagagaagtggcctggagtatgtgctctgagagactggcatgactatccacagtggaagccacaacatttgtcacgtgcagttccaacactggagcctgaaggactcgacctgttagcgaaaatgcttcagtttgatccagcgaacaggatctcagctaaagcggcaatggaccatccctacttcgacagcctcgacaagtcccagttctag

SEQ ID NO: 380 - protein, 304 aa, Triticum aestivum
MEKYEKLEKVGEGTYGKVYKARVAATGQLVALKKTRLEMDEEGIPPTALREISLLRLLSASLYVVRLLSVEQVTKPCGKTVLYLVFEFLDTDLKKFVDGFRKGPSPRPVPTQVVKSFLYQLCKGTAHCHGHGVLHRDLKPQNLLIDKEKGVLKIADLGLSRAFTVPMKSYTHEIVTLWYRAPEVLLGATHYSTGVDIWSIGCIFAEMVRRQALFPGDSELQQLLHIFRLLGTPNEEKWPGVCALRDWHDYPQWKPQHLSRAVPTLEPEGLDLLAKMLQFDPANRISAKAAMDHPYFDSLDKSQF

SEQ ID NO: 381 - DNA, 981 bp, Triticum aestivum
atggcgacgctccagcaccagaaccagggggcagcggcgccgatgaccaccacgggcggcgggctgcgcgccatggacctctacgagaagctggagaaggtcggggagggcacctacgggaaggtgtacaaggcccgggagaaggcgacgggccggatcgtggcgctcaagaagacgcgcctcccggaggacgacgagggcgtgccccccacggcgctcagggaggtctcgctgctgcggatgctgtcgcaggacccgcacgtcgtgcgcctgctggatctcaagcagggccagaacaaggagggccagaccatcctctacctcgtcttcgagtacatggacaccgacctcaagaagttcatccgcggccaccgccagaaccacgagaagatccccgcccacaccgtcaagatcctgatgtaccagctctgcaagggcgtggctttctgccacggacgcggtgtcctgcaccgtgacctcaagccacacaacctgctcatggaccgcaagaccatggctctcaagatcgccgatcttgggctcagtcgtgccttcacggttcctctcaagaagtacacacacgagatccttactctgtggtacagagctccggaggtccttcttggcgccacacactactcaacgccggttgacatgtggtctgtgggctgcatatttgctgaattgatcactaccacggcacttttccctggagactctgaggtgcagcagctcctgcacattttcaagttgctgggcactccaaatgaggatgtctggccaggagtaggcaaactcccgaactggcatgagtaccctcagtggaatgtctcaaagctgtcttctgtcattcctagtctcgatgccgatggtattgatctgcttgagaaaatgctgcagtatgagccggcaaagcggatctctgcgaagaaggccatggagcacccatacttcgatgatgtggacaaggcgctgtactga

SEQ ID NO: 382 - protein, 326 aa, Triticum aestivum
MATLQHQNQGAAAPMTTTGGGLRAMDLYEKLEKVGEGTYGKVYKAREKATGRIVALKKTRLPEDDEGVPPTALREVSLLRMLSQDPHVVRLLDLKQGQNKEGQTILYLVFEYMDTDLKKFIRGHRQNHEKIPAHTVKILMYQLCKGVAFCHGRGVLHRDLKPHNLLMDRKTMALKIADLGLSRAFTVPLKKYTHEILTLWYRAPEVLLGATHYSTPVDMWSVGCIFAELITTTALFPGDSEVQQLLHIFKLLGTPNEDVWPGVGKLPNWHEYPQWNVSKLSSVIPSLDADGIDLLEKMLQYEPAKRISAKKAMEHPYFDDVDKALY

SEQ ID NO: 383 - DNA, 927 bp, Zea mays
atggagatcaacatcgtggacaagtacgagaagctggagaaggtcggggagggcacctacggcaaggtgtacaaggcgcaggacaaggcgacggggcagctggtggcgctgaagaagacccgcctcgagatggacgaggagggcatcccgcccacggcgctccgcgagatctccctcctcaacctcctctcccactccatctacatcgtccgcctcctcgccgtcgagcaggccgctaagaacggcaagcccgtcctctacctcgtcttcgagttcctcgacaccgatctcaagaagtacctcgacgtctaccgcagggggcccagcgccaggccgctccccgcgacactcatcaagaatttcctgtatcagttatgcaaaggagttgcacactgccatagccatggtgtccttcaccgggatttaaagccacaaaacctgctggtggacaaggagaagggtatactgaagattgctgatctgggactcggtagggctttcactgtgcccatgaaaagctacacccatgagattgtgacactttggtacagagctcctgaagttttgcttggagcaacacattactcaactggcgttgatatgtggtctgttggatgcatctttgctgaaatggcccgacggcaggctctctttcctggtgactcggagttgcaacagttgcttcacatcttcaggttgctgggaacacctactgaggaacagtggcctggagtgagtgatttaagggactggcatgagtttccacagtggaagccccagggtttggcacgtgtcgtcccaacactggaacctgaaggagttgaccttctatcgaaaatgcttcagcttgatccttcaaacaggatatcagctttagctgcgatggagcatccctactttaacagccttgacaagtcccagttctag

SEQ ID NO: 384 - protein, 308 aa, Zea mays
MEINIVDKYEKLEKVGEGTYGKVYKAQDKATGQLVALKKTRLEMDEEGIPPTALREISLLNLLSHSIYIVRLLAVEQAAKNGKPVLYLVFEFLDTDLKKYLDVYRRGPSARPLPATLIKNFLYQLCKGVAHCHSHGVLHRDLKPQNLLVDKEKGILKIADLGLGRAFTVPMKSYTHEIVTLWYRAPEVLLGATHYSTGVDMWSVGCIFAEMARRQALFPGDSELQQLLHIFRLLGTPTEEQWPGVSDLRDWHEFPQWKPQGLARVVPTLEPEGVDLLSKMLQLDPSNRISALAAMEHPYFNSLDKSQF

SEQ ID NO: 385 - DNA, 936 bp, Medicago staiva
atggaaaagtacgaaaaactcgaaaaagttggtgaaggaacctatggaaaagtatacaaagcaaaagaactctccacaggccaaatcgtagcactcaaaaaaacccgtctcgaaatggacgaagaaggtgttcctccaacagcacttcgcgaagtttctcttcttcaaatgctctcacaatctctctacatcgttcgtcttctcaacgtcgaacacatcgataaaccccccaaaaacgctacccacaccccctcaaaaccacttctctatcttgtattcgagtatcttgacaccgatctgaagaaattcattgatacttttcgaaaaggcactaaccctagaccgttaccgaatacgctggttcagagttttttgtttcagttgtgtaaaggtgttgctcattgtcatagtcatggtgtgttacatcgtgatttgaaaccgcagaatttgttgctggatcaagcgaaagggattttgaagattgctgatttagggcttgggagagcttttactgtgccgttgaaaagttatactcatgagattgtcactctttggtatagagctcctgaggttttgcttggttcttctacttactctactggtgttgatatttggtctgttggatgtatttttgctgaaatggtgagaagacaggctttgtttccaggggattctgaattccagcagcttctgaacatattcaagcttttggggactccaacggagcagcaatggccaggagttagctctctgcgtgattggcatgtctacccaaggtgggagcctcagaacttggcaagggctgtgccctcattgtcacctgatggagttgacctcctcacgaaaatgctcaagtacaatcctgctgagagaatatctgccaaagcagcacttgatcatccatactttgacagtcttgacaagtctcaatactaa

SEQ ID NO: 386 - protein, 311 aa, Medicago staiva
MEKYEKLEKVGEGTYGKVYKAKELSTGQIVALKKTRLEMDEEGVPPTALREVSLLQMLSQSLYIVRLLNVEHIDKPPKNATHTPSKPLLYLVFEYLDTDLKKFIDTFRKGTNPRPLPNTLVQSFLFQLCKGVAHCHSHGVLHRDLKPQNLLLDQAKGILKIADLGLGRAFTVPLKSYTHEIVTLWYRAPEVLLGSSTYSTGVDIWSVGCIFAEMVRRQALFPGDSEFQQLLNIFKLLGTPTEQQWPGVSSLRDWHVYPRWEPQNLARAVPSLSPDGVDLLTKMLKYNPAERISAKAALDHPYFDSLDKSQY

SEQ ID NO: 387 - DNA, 951 bp, Ricinus communis
atggagaagtacgagaagctagagaaagtaggagaaggaacatacgggaaagtatacaaagcgaaagatagagttacaggccaaatagtggccctcaagaaaacacgtctcgaaatggacgaagaaggcatccctcctaccgctctccgcgaagtctctttactccaaatgctctctcaatccctctatgttgttcgcctcctctccgtcgaacacgttgatgtcaattctgctgatgataacaacattaacaaggaaaacgccatctctaaatctaacctttacttagtgtttgaatatcttgacaccgatcttaaaaagtttattgattcccaccgcaaaggtccaaagcctacgccgcttgcgcctggtttaatacagagtttcttgtttcagctttgtaagggagttgctcattgtcatagtcatggtgtactgcaccgtgatttgaagcctcagaatcttttattggatcaggaaaaggggattttgaagattgctgatttaggacttggacgtgcttttacggttcctttaaagagttatacacatgagattgtcacgctttggtatagagctcctgaggtgttgcttggttctactcattattctactgctgttgatatgtggtctgttggctgtatcttcgctgaaatggcgagaaggcaagctctgtttcctggtgattccgagtttcagcagttgcttcatatttttaggttgttggggacaccaactgaaaaacagtggccaggagtgacttcatttcgtgattggcatgtgtatcctcagtgggagcctcaaaacttggcgcgagctgtttcaagtttgggacctgatggtgttgatcttttatcggaaatgctaaaatatgatccggcagaaagaatctcagccaaagcagctatggatcatccgtattttgacagccttgacaagtctcagttctga

SEQ ID NO: 388 - protein, 316 aa, Ricinus communis
MEKYEKLEKVGEGTYGKVYKAKDRVTGQIVALKKTRLEMDEEGIPPTALREVSLLQMLSQSLYVVRLLSVEHVDVNSADDNNINKENAISKSNLYLVFEYLDTDLKKFIDSHRKGPKPTPLAPGLIQSFLFQLCKGVAHCHSHGVLHRDLKPQNLLLDQEKGILKIADLGLGRAFTVPLKSYTHEIVTLWYRAPEVLLGSTHYSTAVDMWSVGCIFAEMARRQALFPGDSEFQQLLHIFRLLGTPTEKQWPGVTSFRDWHVYPQWEPQNLARAVSSLGPDGVDLLSEMLKYDPAERISAKAAMDHPYFDSLDKSQF

SEQ ID NO: 389 - DNA, 912 bp, Nicotiana tabacum
atggagaaatacgagaaattggagaaagtaggagaaggaacgtacggcaaagtatataaagcaaaggacaaagcaacgggtcaattggtggcgctgaagaaaactcggctagaaatggacgaagaagggattccacccactgctttaagagaaatatcacttcttcaaatgctttccaattctctctacatcgttcgtctcctctgtgtcgagcaaattgacaaaaatgggaagcctcttctttacctagtttttgagtatttggatactgatctgaagaaattcgtcgattctcatcgtaaaggtcctaatcctagacctctccctccttctctcatccagagtttcttatatcaattgtgcaaaggggtcgctcactgccatagccatggagttctccacagagatttgaagccacagaacctattagtggacaaagagaagggcatacttaagattgctgatttgggtcttggaagggctttcactgtcccaataaagagctacacccatgagattgttactctatggtacagagctcctgaagtcttgttgggatctactcattactcaactgcggttgatatgtggtctgtgggatgtatttttgccgagatggttcgaaggcaggccttatttcctggtgactctgagtttcagcaattgcttcacatattcaggttgttaggaaccccaactgagaagcagtggcctggagtgagttcactccgcgactggcatgtttatccaaaatgggaacctcagaacttggcctctgctgttccagcattgggtcctgatggtgtggatctcctcacgaaaatgctccaatatgatccggcagataggatttcagcaaaagctgcacttgatcatccatactttgatagcttggacaagtcgcaattctga

SEQ ID NO: 390 - protein, 303 aa, Nicotiana tabacum
MEKYEKLEKVGEGTYGKVYKAKDKATGQLVALKKTRLEMDEEGIPPTALREISLLQMLSNSLYIVRLLCVEQIDKNGKPLLYLVFEYLDTDLKKFVDSHRKGPNPRPLPPSLIQSFLYQLCKGVAHCHSHGVLHRDLKPQNLLVDKEKGILKIADLGLGRAFTVPIKSYTHEIVTLWYRAPEVLLGSTHYSTAVDMWSVGCIFAEMVRRQALFPGDSEFQQLLHIFRLLGTPTEKQWPGVSSLRDWHVYPKWEPQNLASAVPALGPDGVDLLTKMLQYDPADRISAKAALDHPYFDSLDKSQF

SEQ ID NO: 391 - DNA, 912 bp, Solanum lycopersicum; identical to SEQ ID NO: 373

SEQ ID NO: 392 - protein, 303 aa, Solanum lycopersicum; identical to SEQ ID NO: 374

SEQ ID NO: 393 - DNA, 966 bp, Lotus japonicus
atggaaaactacgagaaactggagaaggtaggagaaggcacatacggcaaagtctacaaagccaaagagaaatccaccggccaagtcgtcgctctcaagaaaacccgtctcgagatggacgaagaaggcgtccctccgaccgccctccgcgaagtctccctcctccagatgctctcccaatccatctacatcgtccgcctcctcaaagtcgagcacgtcgacaaaacccccaaaaacaacaaccaccacccctccgccgccgccgaccaccctcctccgccgtctaaacccctcctctacctcgtcttcgagtacctcgacaccgatctcaagaaatacatcgatacctaccgcaaggggccaaaccctaggccgcttccgcctactttgattcagagttttctgtttcagctctgtatgggtgttgcgcattgtcatagtcacggtgttctccaccgcgatctcaagccgcagaatcttctgcttgatcagcagaaggggattctcaagattgctgatcttgggcttggtcgcgcttttactgttcctctcaagagctatactcatgagattgttactctctggtatagggcgccggaggttcttctcggttcgacgcattactccaccggtgttgatatgtggtctgttggttgcatttttgctgagatggcgagaaggcaagctctgtttccgggggattctgaattccagcagctccttaacattttcaaggttttgggtactccaacggaagagcaatggccaggagttacttcgctgcgtgattggcatgtgtaccctcggtgggagcctcagacattggcaagggctgtgccctctttaggacctgagggtgtggaccttctctcgaaaatgctcaagtacaatcctgctgatagaatttctgccaaagcagcacttgatcatccctactttgatactcttgacaagtctcaatattga

SEQ ID NO: 394 - protein, 321 aa, Lotus japonicus
MENYEKLEKVGEGTYGKVYKAKEKSTGQVVALKKTRLEMDEEGVPPTALREVSLLQMLSQSIYIVRLLKVEHVDKTPKNNNHHPSAAADHPPPPSKPLLYLVFEYLDTDLKKYIDTYRKGPNPRPLPPTLIQSFLFQLCMGVAHCHSHGVLHRDLKPQNLLLDQQKGILKIADLGLGRAFTVPLKSYTHEIVTLWYRAPEVLLGSTHYSTGVDMWSVGCIFAEMARRQALFPGDSEFQQLLNIFKVLGTPTEEQWPGVTSLRDWHVYPRWEPQTLARAVPSLGPEGVDLLSKMLKYNPADRISAKAALDHPYFDTLDKSQY

SEQ ID NO: 395 - DNA, 912 bp, Vitis vinifera
atggacaaatacgaaaagcttgagaaggtcggtgaaggcacctacggcaaggtttacaaggccaaggacaaaaccagcggccaggtggtggctctcaagaagacccgccttgaaatggacgaggaaggcgtccctcccaccgccctccgtgaggtctccctcctccagatgctctcccagtccctctacgtcgtccgcctcctctgcgtcgagcaccttgacaagaacggcaagccttttctctacttggttttcgagtaccttgatactgatctcaagaagttcatcgattcccaccgcaagcctccaaaccctaggccgatgccccccgccctcatccagagttttctctaccagctctgcaagggtgttgcgcactgccacagccacggcgtccttcaccgggatttgaagcctcagaacttgttggtggataaggacaaggggattctcaagatcgccgatctcggcctcgggagggcctttactgttcctctcaagagctacactcatgagattgtcacgctgtggtacagagctccagaggtgttgcttggctctacacattactctaccggtgtggatatgtggtctgttggatgcatttttgctgaaatggtaagaaggcaagctttatttccgggtgactccgagtttcaacaactgcttcatatattcaggttgttgggaacgccaactgagaaacagtggcctggagttagttctctgagagactggcatgtctatccacagtgggaacctcaaaacttggcacgtgctgttccatcattgggacctgatggtgttgaccttctatcgaagatgcttaaatatgacccatctgaaagaatctcagctaaagcagctttggatcatccctacttcgacagccttgacaaatctcaattctga

SEQ ID NO: 396 - protein, 303 aa, Vitis vinifera
MDKYEKLEKVGEGTYGKVYKAKDKTSGQVVALKKTRLEMDEEGVPPTALREVSLLQMLSQSLYVVRLLCVEHLDKNGKPFLYLVFEYLDTDLKKFIDSHRKPPNPRPMPPALIQSFLYQLCKGVAHCHSHGVLHRDLKPQNLLVDKDKGILKIADLGLGRAFTVPLKSYTHEIVTLWYRAPEVLLGSTHYSTGVDMWSVGCIFAEMVRRQALFPGDSEFQQLLHIFRLLGTPTEKQWPGVSSLRDWHVYPQWEPQNLARAVPSLGPDGVDLLSKMLKYDPSERISAKAALDHPYFDSLDKSQF

SEQ ID NO: 397 - DNA, 918 bp, Antirrhinum majus
atggaaaagtacgagaagctggagaaagttggtgaaggcacatacggcaaagtgtacaaagccctagaaaaatccacaggtcaagtggtcgctctgaagaagactcgcctcgagatggacgaagaaggcgtacctccgacggctcttcgcgaggtttcgcttctccagatgctctcgcaatcgctctacgtcgttcgtttgctctccgtcgaacacgtggactgcgccaagaacgggaagcccctgctctacctggttttcgagtatttggacactgatctgaagaaattcatcgattcacatcgaaagggaccaaaccctaggccacttcctcctcagcagattcagagcttcctgttccagctctgtaagggcgtgtcgcattgtcacgctcacggtgttcttcaccgtgatctgaagccgcagaatttgttgttggataaggataagggggttttgaagattgcggatttggggctggcgagggcgtttaccgttcctctcaagagctacacgcacgagattgtgactctgtcgtacagggctcccgaggttctgttgggatcgtcgcattactcgactgccgtggatatgtcgtcggttggttgtatttttgcggagatggtgaggaggcaggctctgtttccgggtgattcggagtttcagcagctgctgcacatttttaggttgctggggacgccgagtgatgagcagtggcccggtgttagttcgctgagggattggcatgtttatccgcagtgggagcctcagaactccgctcccgctgttccgagcttaggacctgatggtcttgaccttctaacgaagacgcttaagtatgatccggcagacaggatttcggcaaaagctgctctggaccatccatactttgacaccctggacaaatctcagttctga

SEQ ID NO: 398 - protein, 305 aa, Antirrhinum majus
MEKYEKLEKVGEGTYGKVYKALEKSTGQVVALKKTRLEMDEEGVPPTALREVSLLQMLSQSLYVVRLLSVEHVDCAKNGKPLLYLVFEYLDTDLKKFIDSHRKGPNPRPLPPQQIQSFLFQLCKGVSHCHAHGVLHRDLKPQNLLLDKDKGVLKIADLGLARAFTVPLKSYTHEIVTLSYRAPEVLLGSSHYSTAVDMSSVGCIFAEMVRRQALFPGDSEFQQLLHIFRLLGTPSDEQWPGVSSLRDWHVYPQWEPQNSAPAVPSLGPDGLDLLTKTLKYDPADRISAKAALDHPYFDTLDKSQF

SEQ ID NO: 399 - DNA, 954 bp, Chenopodium rubrum
atggaaaagtacgagaagttggagaaggttggggaaggaacttacggtaaggtatacaaggctaaggaaaagacgacggggcagctggtggcgctgaagaagacgaggttggagatggatgaggaaggtgtgcctcctaccgctcttagggaggtttcgctgcttcagatgctttctcaatctctctatgttgttaggctactactctgtgttgaacacgttgacaagaagaacactaccaccggaatttctaagcctattttatacttagtttttgaatatctggacactgatctcaagaaattcatcgattctcatcgcaagggttctaatcctcgtccacttcctccttgtcagattcagagttttctctttcaacttcttaagggtgtttctcattgccatagtcatggtgttcttcacagagatcttaagcctcagaatcttttagttgacaaagataagggtattctcaagattgctgatctcggtctcggcagggcttttactgtccctatgaaaagttatactcatgagatcgtcaccctctggtatcgtgcacccgaggttttacttggttctacccattattctactggtgttgatatttggtctgttggctgcatctttgctgaaatggtcagaaggcaggctttgtttcctggtgattctgaatttcaacagctattacacatctttaggctgttgggaaccccaactgacgagcagtggcctggagtaacttctctacgcactggcatgtgtatccgcaatgggagtctcagaatcttgctcgtgcagttccatcgttgggacctgatggtgttgatctcttatctaaaatgctcaaatatgatccagctgaaaggatctcggccaaggcagctctggatcatcccttctttgataatcttgataagtctcaattctaaaaatgctatagtatcttactga

SEQ ID NO: 400 - protein, 317 aa, Chenopodium rubrum
MEKYEKLEKVGEGTYGKVYKAKEKTTGQLVALKKTRLEMDEEGVPPTALREVSLLQMLSQSLYVVRLLLCVEHVDKKNTTTGISKPILYLVFEYLDTDLKKFIDSHRKGSNPRPLPPCQIQSFLFQLLKGVSHCHSHGVLHRDLKPQNLLVDKDKGILKIADLGLGRAFTVPMKSYTHEIVTLWYRAPEVLLGSTHYSTGVDIWSVGCIFAEMVRRQALFPGDSEFQQLLHIFRLLGTPTDEQWPGVTSLRTGMCIRNGSLRILLVQFHRWDLMVLISYLKCSNMIQLKGSRPRQLWIIPSLIILISLNSKNAIVSY

SEQ ID NO: 401 - DNA, 927 bp, Sorghum bicolor
atggagatcaacatcgtggacaagtacgagaagctggagaaggtcggtgaggggacgtacgggaaggtgtacaaggcgcaggacaaggcgacggggcagctggtggcgctgaagaagacccggctcgagatggacgaggaagggatcccgcccaccgcgctccgcgagatctccctcctcaacctcctctcccactccatctacgtcgtccgactcctcgccgtcgagcaggccgccaagaacggcaagcccgtcctctacctcgtcttcgagttcctcgacaccgatctcaagaagtacctcgatgtctaccgtaggggacccgccgccaggccgctccccgctacactcatcaagaatttcctgtatcagttatgcaaaggagttgcacactgccatggccatggtgtccttcaccgggatttgaagccacaaaacctgctggtggacaaggataaagggatactcaagattgctgatcttggtcttggtagagctttcactgtgcctatgaaaagctacacccatgagattgtgacactttggtatagagctcctgaagttttgcttggagcaacacattactcaactggggttgatatgtggtctgttggatgcatctttgctgaaatggcccgacggcaggctctctttcccggtgactctgagttgcaacagttgcttcacatcttcaggttgctgggaacaccttctgaggagcagtggcctggagtgagtgaattgagggattggcatgaatttccacagtggaagcctcagagtttggcacgtgtcgtcccaacactggaacctgaaggcgttgacctgctatcgaaaatgcttcagcttgatccttcaaacaggatatcagctatagctgcgatggagcatccatactttgacagccttgacaagtcccagttctag

SEQ ID NO: 402 - protein, 308 aa, Sorghum bicolor
MEINIVDKYEKLEKVGEGTYGKVYKAQDKATGQLVALKKTRLEMDEEGIPPTALREISLLNLLSHSIYVVRLLAVEQAAKNGKPVLYLVFEFLDTDLKKYLDVYRRGPAARPLPATLIKNFLYQLCKGVAHCHGHGVLHRDLKPQNLLVDKDKGILKIADLGLGRAFTVPMKSYTHEIVTLWYRAPEVLLGATHYSTGVDMWSVGCIFAEMARRQALFPGDSELQQLLHIFRLLGTPSEEQWPGVSELRDWHEFPQWKPQSLARVVPTLEPEGVDLLSKMLQLDPSNRISAIAAMEHPYFDSLDKSQF

SEQ ID NO: 403 - protein, 7 aa, Artificial sequence
  motif 1
  misc_feature (2)..(2): Xaa can be any naturally occurring amino acid
  misc_feature (4)..(4): Xaa can be any naturally occurring amino acid
PXTXLRE

SEQ ID NO: 404 - protein, 7 aa, Artificial sequence
  motif 1
  VARIANT (2)..(2): Xaa can be Pro or Ser
  VARIANT (4)..(4): Xaa can be Ala or Thr
PXTXLRE

SEQ ID NO: 405 - DNA, 1130 bp, Oryza sativa
catgcggctaatgtagatgctcactgcgctagtagtaaggtactccagtacattatggaatatacaaagctgtaatactcgtatcagcaagagagaggcacacaagttgtagcagtagcacaggattagaaaaacgggacgacaaatagtaatggaaaaacaaaaaaaaacaaggaaacacatggcaatataaatggagaaatcacaagaggaacagaatccgggcaatacgctgcgaaagtactcgtacgtaaaaaaaagaggcgcattcatgtgtggacagcgtgcagcagaagcagggatttgaaaccactcaaatccaccactgcaaaccttcaaacgaggccatggtttgaagcatagaaagcacaggtaagaagcacaacgccctcgctctccaccctcccacccaatcgcgacgcacctcgcggatcggtgacgtggcctcgccccccaaaaatatcccgcggcgtgaagctgacaccccgggcccacccacctgtcacgttggcacatgttggttatggttcccggccgcaccaaaatatcaacgcggcgcggcccaaaatttccaaaatcccgcccaagcccctggcgcgtgccgctcttccacccaggtccctctcgtaatccataatggcgtgtgtaccctcggctggttgtacgtgggcgggttaccctgggggtgtgggtggatgacgggtgggcccggaggaggtccggccccgcgcgtcatcgcggggcggggtgtagcgggtgcgaaaaggaggcgatcggtacgaaaattcaaattaggaggtggggggcggggcccttggagaataagcggaatcgcagatatgcccctgacttggcttggctcctcttcttcttatcccttgtcctcgcaaccccgcttccttctctcctctcctcttctcttctcttctctggtggtgtgggtgtgtccctgtctcccctctccttcctcctctcctttcccctcctctcttcccccctctcacaagagagagagcgccagactctccccaggtgaggtgagaccagtctttttgctcgattcgacgcgcctttcacgccgcctcgcgcggatctgaccgcttccctcgcccttctcgcaggattcagcc

SEQ ID NO: 406 - DNA, 1074 bp, Populus trichocarpa
atggcaggcttttcatatcaacatcaaccgttgtttcctgactcggctttcttgccaagcatagccacacccactaagaacatgaacaacaacatgtatggttcttttgaggaagctggaaacatgatgaataccaacggtttctcccaaatttactctcctgaaacttttcatgaaacacctagtcttgatgttagatttcatcaaagtagccatcctgatgatcatagctataaggtgtctcttagtgataatgagacttctttgactaaaaaacagagcacaaactcctcaaccgtggttgataagcttgaaagtgagcacgttactcaagaggtaactcccatggccaggaagaggaaaagtgctaatgggttcttgaattctgctcaatcaaaggatgctagaaaagtgaaaagcaagagacaaaataaatgcagtggtgacatgaaacacgaagagaagaagccaaaagttgagaagaaagttcatggagagcctccagcaggctacattcatgtaagagcaaggaggggccaagcaacagacagccacagccttgctgagagggtaagaagagagagaatcagtgagagaatgaagatactacagcttcttgttcctggctgtgacaagattactgggaaggcccttatgctggacgagattattaattatgttcagtccctgcaaaatcaagtggagttcctatccatgaagcttgcctctgttaatcccttgctctatgattttggaatggaccgtgatgcattcatggttagaccagagagattaagtagcatgtctccaccactgccatctctgcaacacaacagtcctatccagcccacagcttttgccgacaccgcctccgccaccaccgccacctttgctacagaagaaaataactatcctcttattgataattctgctacgctttttcttcaaggaatgaggcctagtgacttcactactcatcaggatagtggttacctaatgtgggatgtggatgagcaaagacaaaaatttcttaatccatctgggcttgccaccaacttgtgttctttccattaa

SEQ ID NO: 407 - protein, 357 aa, Populus trichocarpa
MAGFSYQHQPLFPDSAFLPSIATPTKNMNNNMYGSFEEAGNMMNTNGFSQIYSPETFHETPSLDVRFHQSSHPDDHSYKVSLSDNETSLTKKQSTNSSTVVDKLESEHVTQEVTPMARKRKSANGFLNSAQSKDARKVKSKRQNKCSGDMKHEEKKPKVEKKVHGEPPAGYIHVRARRGQATDSHSLAERVRRERISERMKILQLLVPGCDKITGKALMLDEIINYVQSLQNQVEFLSMKLASVNPLLYDFGMDRDAFMVRPERLSSMSPPLPSLQHNSPIQPTAFADTASATTATFATEENNYPLIDNSATLFLQGMRPSDFTTHQDSGYLMWDVDEQRQKFLNPSGLATNLCSFH

SEQ ID NO: 408 - DNA, 846 bp, Arabidopsis lyrata
atggcaactttctcttatttccaaaactaccctcattcccttcttgatcctcttctcttccctacacctcacccctccattaatctcactggtttcatcgatcaaaatcatctccatccactaccaaacatttccacagttgaagacatttcctttaacccatttcttgatgaatataatgttgacagacccgaaaactctggcttagagaaacaggctaacacaaccaaaaccgcaaccacccgttcttcatcctgcgaccacggatcatcagccatcaccaccatcggaaaaaagcgtgggaggaaggccagaaatgtttctaactccaaggaaggagtagagggaacaaaaagcaaaaaacagaagagaggaagtaaagaagagcctccaaaagattatattcacgttcgagctagaagaggccaagctactgatagccacagccttgctgagagggtgagaagggaaaagataagtgagaggatgagaactctgcaaaaccttgttccgggctgtgataaggtaacagggaaggccctcatgttggatgaaattataaattacgtccagaccttgcaaaatcaagttgagtttctctcgatgaagctaacttctataagtccggtcgtctatgactttggttccgaccttgatggcctcgtacttagatctgagatgggatctccagaagtaggaacgtcttttaccaatacaatgccaacaactacttctatctttccttcactattggataatgctatagttcaggaagagggagaaggaagagagaagtttgtagacagaagtgggttcaacaacaacaacttctgttctttcccttga

SEQ ID NO: 409 - protein, 281 aa, Arabidopsis lyrata
MATFSYFQNYPHSLLDPLLFPTPHPSINLTGFIDQNHLHPLPNISTVEDISFNPFLDEYNVDRPENSGLEKQANTTKTATTRSSSCDHGSSAITTIGKKRGRKARNVSNSKEGVEGTKSKKQKRGSKEEPPKDYIHVRARRGQATDSHSLAERVRREKISERMRTLQNLVPGCDKVTGKALMLDEIINYVQTLQNQVEFLSMKLTSISPVVYDFGSDLDGLVLRSEMGSPEVGTSFTNTMPTTTSIFPSLLDNAIVQEEGEGREKFVDRSGFNNNNFCSFP

SEQ ID NO: 410 - DNA, 861 bp, Arabidopsis thaliana
atggcaactttctcttatttccaaaactaccctcattcccttcttgatcctcttctcttccctacacctcactcctccattaatctcactagtttcatcgatcaaaaccatctctatccactaccaaacatttccacagttgaagacatttcctttcttgaatataatgttgacaaaactgaaaactctggttcagagaaactggccaacacaaccaaaacagcaaccaccggttcttcttcctgcgaccagctcagccacggaccatcagccatcaccaacaccggaaaaacccgtgggaggaaggccagaaacagtaataactccaaggaaggagtagagggaagaaaaagcaaaaaacagaagagaggaagcaaagaagagcctccaacagattacattcacgttcgagctagaagaggccaagctactgatagccacagccttgctgagagggtgagaagggaaaagataagtgagcggatgaggactctgcaaaaccttgttccgggctgtgataaggtaacagggaaggccctcatgttggatgagattataaattatgtccagaccttgcagactcaagttgagtttctctcaatgaagctaacttctataagtccggtggtctatgactttggctccgaccttgatggcctcatacttcaatctgagatgggttctccagaagtaggaacgtcttttaccaatgcaatgccaacaactactcctatctttccttcactattggataattctgtagttcccacacatgcacaagttcaggaagagggagaagaaagagagaactttgtagacagaagtgggttcaacaacaacaacttctgttctttcccttga

SEQ ID NO: 411 - protein, 286 aa, Arabidopsis thaliana
MATFSYFQNYPHSLLDPLLFPTPHSSINLTSFIDQNHLYPLPNISTVEDISFLEYNVDKTENSGSEKLANTTKTATTGSSSCDQLSHGPSAITNTGKTRGRKARNSNNSKEGVEGRKSKKQKRGSKEEPPTDYIHVRARRGQATDSHSLAERVRREKISERMRTLQNLVPGCDKVTGKALMLDEIINYVQTLQTQVEFLSMKLTSISPVVYDFGSDLDGLILQSEMGSPEVGTSFTNAMPTTTPIFPSLLDNSVVPTHAQVQEEGEERENFVDRSGFNNNNFCSFP

SEQ ID NO: 412 - DNA, 1002 bp, Aquilegia sp.
atggcagctttctcttaccaacatctttcaccctttcttgacttgtcagttttattaccaaactcatctcctattaagatgtctggtttattggaggaaggatatattgataacatttctacatgctttccttattcttccttatctgagcattttcaagagtttcctattgagaagcagaggacagattcttcatccattgttgttgatcttgaaggtagtactagtgatcatcaagtgactgatcagatggacatgactccagtggaagaaaagaaaaggaaaaatagagatgggtcttgcttgagttcttctgaatctaaggattcaaagataagtactagagccaaaaaacaaagaaactgcagtggtaatattaatgatgcagagaagaaaatgagcaaagatgaaaagaagaatcagagaaaggattctgaagtagcccaaagtggatatgttcatgtgagagcaaggagaggtgaagcaacagacagtcacagtcttgcagaaagggtaagaagagaaaaaatcagtgaaaggttgaagttgttgcaaagtctagttccaggctgtgacaaggtgactagcaaggccctcatgttagatgaaataattaactatgtccagtccctacaacatcaagtagagtttctctcaatgaagcttgcttccatgagtcccattgcctatgacatgggtggacttgatataaactccttggttaaacaagagaaactaagtagcttgtcatcagcattattacctccagttcagctatccaacactgttgctgatattacagcttcattcaccacagcaaatagtagtaaccttcttatgaacagtccagtatcttatttacttcaacaagcagcagggcaaagacccaacaatgtcttgtgtcagcaggacaatggcaacctattatggagtgttgatcaacagagaccaacaaggttctttaatcagtcagatttcagcagcttgtgctcttttcagtaa

SEQ ID NO: 413 - protein, 333 aa, Aquilegia sp.
MAAFSYQHLSPFLDLSVLLPNSSPIKMSGLLEEGYIDNISTCFPYSSLSEHFQEFPIEKQRTDSSSIVVDLEGSTSDHQVTDQMDMTPVEEKKRKNRDGSCLSSSESKDSKISTRAKKQRNCSGNINDAEKKMSKDEKKNQRKDSEVAQSGYVHVRARRGEATDSHSLAERVRREKISERLKLLQSLVPGCDKVTSKALMLDEIINYVQSLQHQVEFLSMKLASMSPIAYDMGGLDINSLVKQEKLSSLSSALLPPVQLSNTVADITASFTTANSSNLLMNSPVSYLLQQAAGQRPNNVLCQQDNGNLLWSVDQQRPTRFFNQSDFSSLCSFQ

SEQ ID NO: 414 - DNA, 972 bp, Brassica napus
atggcatctttctcttatttccaacattaccctcattctcttcttgatcctcttctcttttcctcacccaactcctcaactaagctctctggtttcatcgaccagaaccctctctatccaccaccaaacatttctacaatagtagatacttccttgaacccatttcttgattcatttaatgttgagaaaaccgaaagctctgatgttaagaaacagatcaacactaatgcaactgcagcactcacaggcgaccagctcagccccggaccatccactacgtccgcaggaaaaaaacaacggaggaagaccagaaatgggtctaagtctaaggaaggagtagagggaagaaaatgcaaaaagccaagaaatggtagcatctcaacagacgtaaaagtgaagagagcgagcgaacaagagcctcccaaagattacattcacgttagagccagaagaggccaagctactgatagccacagcctcgccgagagggcgagaagggaaaagataagtgaacggatgaggactctgcaaaaccttgtcccaggatgtgataaggtaacagggaaggccctcatgttggatgagattataaattatgttcagtccttgcagaatcaagttgagtttctatcgatgaagctagcttccataagtccagtggtctatgacttcggttcggatcttgatggcatcatagttagacctgagatgggatccgcagacgttggaacgtcgtttgctaatgcaatgccaacaactactactaacttttcttcactattggatgattctatattacccgcagaggcacatcttcaggagggatggaggggaaagggagaagactgtagacagaagtgggttcaacaacaacagcttttgttctttctcttaattaatcacatgtcgacacaaacacaaaagcctgctttcgttgattcaatatcctcaaatacgcaggggaggggataa

SEQ ID NO: 415 - protein, 323 aa, Brassica napus
MASFSYFQHYPHSLLDPLLFSSPNSSTKLSGFIDQNPLYPPPNISTIVDTSLNPFLDSFNVEKTESSDVKKQINTNATAALTGDQLSPGPSTTSAGKKQRRKTRNGSKSKEGVEGRKCKKPRNGSISTDVKVKRASEQEPPKDYIHVRARRGQATDSHSLAERARREKISERMRTLQNLVPGCDKVTGKALMLDEIINYVQSLQNQVEFLSMKLASISPVVYDFGSDLDGIIVRPEMGSADVGTSFANAMPTTTTNFSSLLDDSILPAEAHLQEGWRGKGEDCRQKWVQQQQLLFFLLINHMSTQTQKPAFVDSISSNTQGRG

SEQ ID NO: 416 - DNA, 1023 bp, Capsicum annuum
atgtctactttttcatcataccaattacaacaacacaataccccttctcttcttgattcagtatttttgccaagttcacctctaaaaatgtctggcttttttgaggaaccaaacaattcttgtgttgtccaaaattgtttttctcaattttaccaaccagaattccctaccaataatgttaatgttaatgaaaatagctattgccttgaccaaaacacaaatgttactaacaaaagtagtagcagtataagcttggatatggactcttcttctgttactgataaaatggaaagtggaaataataagcctaatgttactagtcctatggacaagaaaagaaaatccagagaagggtcttcttctatgacttctgcaaattctaagaatgtaacacaaggtgataatgggaaaaagaacaagagcaatagcaaattagtagccaaagatgagaaaaaagctaatgaagaggcaccaacaggctacattcatgttagagcaagaagaggccaagcaactgacagccatagtcttgctgaaagggtgaggagagagaaaataagtgaaaggatgaaaatgctgcaatctcttgttcctggttgtgacaaggtaactgggaaggcccttatgttggatgagataatcaattatgtccaatctttgcaaaatcaagttgagtttctgtcaatgaaacttgcttctttgaatccaatgtactatgactttggcatggacttagatgcactcatggtcaggcctgatgaccagaatttgagtggcttggagacacaactaccaaatattcagcaagctagcactactacatcacaagcagctgaagttattcctaacactaatagtggctatccttttttggataattcagcatcacttatgtttcaacaagcccatttccctaattccattcatcagggaattggacagctcttatggggtgcagaagaccaaagacaaaaaataataaatcagtcaggattcagcaacaacttttgttctttccattaa

SEQ ID NO: 417 - protein, 340 aa, Capsicum annuum
MSTFSSYQLQQHNTPSLLDSVFLPSSPLKMSGFFEEPNNSCVVQNCFSQFYQPEFPTNNVNVNENSYCLDQNTNVTNKSSSSISLDMDSSSVTDKMESGNNKPNVTSPMDKKRKSREGSSSMTSANSKNVTQGDNGKKNKSNSKLVAKDEKKANEEAPTGYIHVRARRGQATDSHSLAERVRREKISERMKMLQSLVPGCDKVTGKALMLDEIINYVQSLQNQVEFLSMKLASLNPMYYDFGMDLDALMVRPDDQNLSGLETQLPNIQQASTTTSQAAEVIPNTNSGYPFLDNSASLMFQQAHFPNSIHQGIGQLLWGAEDQRQKIINQSGFSNNFCSFH

SEQ ID NO: 418 - DNA, 1113 bp, Citrus sinensis
atggcagccttttcataccaacaacaccaccacccttttcttttagactcgtcagagttcattgaggaaggcagttttttctctcaactttattacccaccaaaatttcctactcatgatgatcatcaagagatgattgttgttaataataacagcaataatcttcttgatgcagctgcagtttttgaaactagctgtggtgacaatcatgatcatcacagtgatgataattgtaatgagccttctaataataattctttagccaccaaaaaccaaagcactgcagtgtcttcaactgagcagcaggtcactcagagtactgtgacgactaccgctactactactcgtatggacaagaaaaggaagaacagaactaatgcttcctcttctttcaattctgctcagtcaaaggatccaagagaagtgaaaagcaagaagcaaaagaaaggcaatgttaatgatgccaagaaagaagaaaaggaaaatagtcctaaagctgatagtgagaagaaagttgctaaagaacctccaaaagattacattcatgttagagcaaggaggggtcaagcaactgacagccacagcttagcagaaagggtaagaagagagaaaattagtgagaggatgaaaattttgcaaaagcttgttcctggctgtgacaaggtaactggtaaggccttcatgttggatgaaattatcaactatgtacagttcttacaaaaccaagtggagttcctctcaatgaagcttgcttctgtgaatcccatgttctatgattttggaatggacctagataacacattcatggtcaggccagatgatcagcagaatttgaatagcattattgctgcttcagcttcagcacctcaagtgcaatgcagccccacagcccagctcacagcttttgctgacacaaccactgcctttgccccagctgatcatcgcaataactatcctgttcttgatactgcatttttacttcaacaagggcagaggccaaatgccttaatctatcaggataatgggaatagtctcctttgggatgttgaagaccaaaaacaaaggtttcttaacccatctgggttcaccagcaacttgtgttctttcaattaa

SEQ ID NO: 419 - protein, 370 aa, Citrus sinensis
MAAFSYQQHHHPFLLDSSEFIEEGSFFSQLYYPPKFPTHDDHQEMIVVNNNSNNLLDAAAVFETSCGDNHDHHSDDNCNEPSNNNSLATKNQSTAVSSTEQQVTQSTVTTTATTTRMDKKRKNRTNASSSFNSAQSKDPREVKSKKQKKGNVNDAKKEEKENSPKADSEKKVAKEPPKDYIHVRARRGQATDSHSLAERVRREKISERMKILQKLVPGCDKVTGKAFMLDEIINYVQFLQNQVEFLSMKLASVNPMFYDFGMDLDNTFMVRPDDQQNLNSIIAASASAPQVQCSPTAQLTAFADTTTAFAPADHRNNYPVLDTAFLLQQGQRPNALIYQDNGNSLLWDVEDQKQRFLNPSGFTSNLCSFN

SEQ ID NO: 420 - DNA, 1041 bp, Glycine max
atggcagctttttcataccaataccatccttttcttgttgaccctgcattcttccccaacaacttaaacaccccttcccctcctcctcatcagtttcaacaactccctcatgaaacatcatcttttaatgtcacaaaccaggagactagctgtgttgatcagagctccaagatcaccatcagtgacaatgagccttctgtcactgaaaaccttagccctcagtcctccatggtagtggacaagcttgaaactggggagcaggtcactcagaaggtgaacactcctgtggagaagaaaaggaaaaccagaaatggatcttccttgactagtaacccccaatccaaggatgctgcaacagaaaggaaaaacaagaaacaaaggaagggcaatggtgggttgaaagaagaggacaaggcaaaagaagagaagaaggaacagagaaagtgtcccgaagagcctccaacaggctatatccatgtcagagcaagaaggggtcaggcaacggatagccacagccttgctgaaagggtgagaagagagaagataagtgaaaggatgaaggtgttgcaacggcttgtgccaggctgtgacaaggtgactggaaaggcccttatgttggacgaaataatcaattatgttcagtctctacagaatcaagttgagttcttgtcaatgaagcttgcttcagtgaatcccatgttttatgacttggcaacggatctagacaccctcttggttagaccagagaaactaaatagcatggcatcaccatcaccaccactaccatctgtgtcacattgcaacagccctaacaaccaagccactacttttgctgatacaaccaccatgacccccaccaacatcttccacattgctagtgactatcttttggataattcagtctcattttttcttcaagggcagaggtcaaatgtgttctctgaggaggatactggtagtcatttctgggacgcagaggaccagcggcaaaagtttcttcatccatgtggattcagcaacaacttatgttcctttcattaa

SEQ ID NO: 421 - protein, 346 aa, Glycine max
MAAFSYQYHPFLVDPAFFPNNLNTPSPPPHQFQQLPHETSSFNVTNQETSCVDQSSKITISDNEPSVTENLSPQSSMVVDKLETGEQVTQKVNTPVEKKRKTRNGSSLTSNPQSKDAATERKNKKQRKGNGGLKEEDKAKEEKKEQRKCPEEPPTGYIHVRARRGQATDSHSLAERVRREKISERMKVLQRLVPGCDKVTGKALMLDEIINYVQSLQNQVEFLSMKLASVNPMFYDLATDLDTLLVRPEKLNSMASPSPPLPSVSHCNSPNNQATTFADTTTMTPTNIFHIASDYLLDNSVSFFLQGQRSNVFSEEDTGSHFWDAEDQRQKFLHPCGFSNNLCSFH

SEQ ID NO: 422 - DNA, 1029 bp, Glycine max
atggcagctttttcatcccaatactaccattcctttgtggttgactccgcatgcttctcaattactcctcccattataaacacttctagtaactttcttccttctcctcattatcttcacaataataatattcaggaaacgtcttatagtgtcactgataataaggaaacaagctgttttgaacaaagctccaaggttaccatcagtgacattgaactttctgtggtaaaaaaccatagtcctgagacttccatggtagtggacaagcttgaaaaaggtgaacaggtcactcagaaggtggtgacccgcatggagaagaagagaagagcaagaaatggatcttcctcgagtgaccctttatcaaaggagtcaacagaagggggaaagaagaaacaaaagaagccaaaagaagtgacgaaggacaagaaaataggtgctgaagatcctccaactgggtatatccacgttagagcaagaaggggtcaagcaaccgatagccacagccttgctgaaagggtgagaagagagaaaataagtaaaaggatgacgacgttgcagcgacttgtgccaggctgtgataaggtaaccggaaaggcccttgtgttggacgaaataatcaattatgttcagtccttacagaatcaagtggagttcttgtcaatgaaacttgcatccgtgaatcccatgttctttgactcggccatggacttagacaccctcatggttagacccgatcagaaattgagtaatatagcatcaccatcaccactaccatgtgtagcacaattcagaccccaccaggccattgcttttgctgacacaattaccaccccgaccaccactaccaatagcttccccacagctaataatgatggctatcttttggattattcatcctcactttttcttcaaggccatagaccaaatatctttgaggataacggtggtcagttttgggacgtagaagaccaacgacaaaagtttcttcatccatatagattcggcaataattcgggttctttcaattga

SEQ ID NO: 423 - protein, 342 aa, Glycine max
MAAFSSQYYHSFVVDSACFSITPPIINTSSNFLPSPHYLHNNNIQETSYSVTDNKETSCFEQSSKVTISDIELSVVKNHSPETSMVVDKLEKGEQVTQKVVTRMEKKRRARNGSSSSDPLSKESTEGGKKKQKKPKEVTKDKKIGAEDPPTGYIHVRARRGQATDSHSLAERVRREKISKRMTTLQRLVPGCDKVTGKALVLDEIINYVQSLQNQVEFLSMKLASVNPMFFDSAMDLDTLMVRPDQKLSNIASPSPLPCVAQFRPHQAIAFADTITTPTTTTNSFPTANNDGYLLDYSSSLFLQGHRPNIFEDNGGQFWDVEDQRQKFLHPYRFGNNSGSFN

SEQ ID NO: 424 - DNA, 1050 bp, Glycine max
atggcagctttttcataccaataccatccttttcttgttgaccctgcattctttcccaacaacttaaacactcctaactctcctcctcctcctcttccttctcagtttcaacaactccctcatgaaacatcatcttttaatgtcacaaaccaggagactagctgtgttgaccagagctccaagatcaccatcagtgacaatgagccttctgtcactaaaaaccttagccctcagtcctccatggtagtcgacaagcttgaaactggggagcaggtcactcagaaggtgaacattcctgtggacaagaaaaggagaactagaaatggttcttccttcaccagtaacccccaatccaaggatactgcaacagaagggaaaaacaagaaacaaaggaagaacaatggtgggttgaaagaagaggacaaggcaaaagaagagaagaaggatcagagaaagtgtcctgaagagcccccaacaggctatatccacgtcagagcaagaaggggtcaggcaacggatagccacagccttgctgaaagggtgagaagagagaagataagtgaaaggatgaaggtgttgcaacggcttgtgccaggctgtgataaggtgactggaaaggcccttatgttggatgaaataatcaattatgttcagtctttacagaatcaagttgagttcttgtcaatgaagcttgcttcggtgaatcccatgttttatgacttggcaacggatctagacaccctcttggttaggccagagaaactaaatagcatggcatcaccatcaccactaccatcaatgtcacattgcaacagccccaacaaccaagccacaacttttgctgatacaaccaccatgacccccaccaacatcttccacactactagtgactatcttttggataattcagtctcattttttcttcaagggcagaggccaaatgtgttatctgaggaggataccggtagtcatttctgggacgcagaggaccagcgacaaaagtttcttcatccatatggattcagcaacaacttatgttcctttcattaa

SEQ ID NO: 425 - protein, 349 aa, Glycine max
MAAFSYQYHPFLVDPAFFPNNLNTPNSPPPPLPSQFQQLPHETSSFNVTNQETSCVDQSSKITISDNEPSVTKNLSPQSSMVVDKLETGEQVTQKVNIPVDKKRRTRNGSSFTSNPQSKDTATEGKNKKQRKNNGGLKEEDKAKEEKKDQRKCPEEPPTGYIHVRARRGQATDSHSLAERVRREKISERMKVLQRLVPGCDKVTGKALMLDEIINYVQSLQNQVEFLSMKLASVNPMFYDLATDLDTLLVRPEKLNSMASPSPLPSMSHCNSPNNQATTFADTTTMTPTNIFHTTSDYLLDNSVSFFLQGQRPNVLSEEDTGSHFWDAEDQRQKFLHPYGFSNNLCSFH

SEQ ID NO: 426 - DNA, 1002 bp, Gossypium raimondii
atggcgacctattcgtttcagtctcatccttttcttcttgactccattttcttaccaaacacgtccactaccaaagtgtctggtttggtggaagaaggcaacatcattaatcccaattgtttccctcaattttaccaggattcacctgttgggtctatgctccatcaaagtagctgtcttgatcacagttcaaatgagccttccaccgtgactaaaaaacagagcaccgaagatgattcctccactgcggtggataagcttgaaagtggtgagcaagtcactcaaaagaaaaggacaaggaatgggacaacctcgaattccccacaatttaagggtgcaaaagaagggaaaaccaagaagcaaaagaagtgcaatgacggcttgaaaaatgaaaagaaagggtgtaactctaaagctgataagaaagaccaagagaaatcaaccgagcagccaccaacaggttacattcatgttagagccaggcggggtcaagccaccgacagccacagtctagcagaaagggtaagaagagagaaaataagtgaaaggatgaagacattacagcgacttgttccagggtgtgacaaggtgactggaaaggcccttatgttggatgaaattatcaattatgttcagtccctacaaaaccaagttgagtttctgtcaatgaagcttgcttctttgagccccacgttctatgactttggagtggacctggaaacattgatgatcagaccagaaagggtgagcagtactgaaacatccccacttccaatgccatgtccacaacaatgtaaccccattcagaccaccattgccccatctcacattaattatcctcttctggatgtttcaactgcactttttcttcaacaggggctaaggcccaatctcttttctcactctcaggataatggaagtgtattgtgggatgtggaggaccaaagacaaaaaattttcaactcatttcagctcaacgacaacttatgttttttccattaa

SEQ ID NO: 427 - protein, 333 aa, Gossypium raimondii
MATYSFQSHPFLLDSIFLPNTSTTKVSGLVEEGNIINPNCFPQFYQDSPVGSMLHQSSCLDHSSNEPSTVTKKQSTEDDSSTAVDKLESGEQVTQKKRTRNGTTSNSPQFKGAKEGKTKKQKKCNDGLKNEKKGCNSKADKKDQEKSTEQPPTGYIHVRARRGQATDSHSLAERVRREKISERMKTLQRLVPGCDKVTGKALMLDEIINYVQSLQNQVEFLSMKLASLSPTFYDFGVDLETLMIRPERVSSTETSPLPMPCPQQCNPIQTTIAPSHINYPLLDVSTALFLQQGLRPNLFSHSQDNGSVLWDVEDQRQKIFNSFQLNDNLCFFH

SEQ ID NO: 428 - DNA, 1089 bp, Malus x domestica
atggcagccttttcataccaaaatctccaccacctttctctccttgactcaattttcttgcccaacgctcctactaccaatagcatcaacactgacagtaacttctctcaatctttttacccatctgagcctttaacccaggaaattcaagctgataataattcaagagctgttgaaagcagctgcactatggatcatagctctactaaggttgcttttagtgacaatgagaatgatccttctgtgaccaaaaacaagagcacagagtcctcaactgttgtggacgtggataggattgaaattggtgatcaggtcactcagaaagtgactcctatgggcaagaagagaaaatccagaactggatcatccttcaattctgctcaatccaagggtactaaagagcagaagggaaagaagcaaaagaagattgatggcggtaccaagaaagatgaggaaaagaagattaaatcagatgaagaagaccaggtgaaagtaagagaaggacctccaactggctacattcatgttagagcaaggaggggtcaggctacagatagtcacagccttgcagaaagggtaagaagacagaaaattagtgagaggatgaagatgttgcaaagacttgttcctggctgtgacaagataactggaagggcagtcatgctggatgaaattatcaattatgttcagtccctacaaaatcaagtggagttcctctcagtgaaacttgattctttcaatccaatgttctacgactttggaatcgacattggtgctttggtggtcaaaccagagagattgtgtagcacggaatcaccatatcaatctgtgccacaatgcaacccaacacagccaacaccttttgctgatacatccaccaacatcaccgccaccactgccgttgccgctgccgctgccaccacaaataacaactgtccttttctagacagttcagcttcacttctacttcaaaggccaaataccttctttcaggacggtgagagcttgttgtgggatgtggaagatcaaagacaaagctttcttaatccatctggtttcagcaacagcaacttgtgttctttcaattaa

SEQ ID NO: 429 - protein, 362 aa, Malus x domestica
MAAFSYQNLHHLSLLDSIFLPNAPTTNSINTDSNFSQSFYPSEPLTQEIQADNNSRAVESSCTMDHSSTKVAFSDNENDPSVTKNKSTESSTVVDVDRIEIGDQVTQKVTPMGKKRKSRTGSSFNSAQSKGTKEQKGKKQKKIDGGTKKDEEKKIKSDEEDQVKVREGPPTGYIHVRARRGQATDSHSLAERVRRQKISERMKMLQRLVPGCDKITGRAVMLDEIINYVQSLQNQVEFLSVKLDSFNPMFYDFGIDIGALVVKPERLCSTESPYQSVPQCNPTQPTPFADTSTNITATTAVAAAAATTNNNCPFLDSSASLLLQRPNTFFQDGESLLWDVEDQRQSFLNPSGFSNSNLCSFN

SEQ ID NO: 430 - DNA, 684 bp, Nicotiana tabacum
atgagttctgctcattctaagaatgtaaaacaggttgataatgggaaaaagaagaaaagcaatagccaatcagtagccaaagaggagaaaaagggaaaagaggagaagaaagctaatgaagaggctccaacaggctacattcatgttagagcaagaaggggtcaagcaacagacagccatagtcttgctgaaagggtgcggagagagaaaataagtgaaaggatgaagatactgcaatctattgttcctggttgtgacaaggtaactgggaaggccctcatgttggatgagataatcagttatgtccaatctttgcaaaaccaagttgagtttctcttcatgaaacttgcttctttgaatccaatgtactatgattttggcatggacttagatgcactcatggtcagacctgaccagagtttgagtggattgggaacaccactgccaaatatgcagcaagctagccctactaacattacatcgcaggcagctgaagttattcctaacattaataatagtggctatcctttcttggataattcagcttcactcatgtttcaacaagcacattttcctaattccatttctcagggtaatggacagctcttatggggtgcagatgaccaaagacaaaaatttattaatcagtcaggactcagcaacaacttttgttctttccattaa

SEQ ID NO: 431 - protein, 227 aa, Nicotiana tabacum
MSSAHSKNVKQVDNGKKKKSNSQSVAKEEKKGKEEKKANEEAPTGYIHVRARRGQATDSHSLAERVRREKISERMKILQSIVPGCDKVTGKALMLDEIISYVQSLQNQVEFLFMKLASLNPMYYDFGMDLDALMVRPDQSLSGLGTPLPNMQQASPTNITSQAAEVIPNINNSGYPFLDNSASLMFQQAHFPNSISQGNGQLLWGADDQRQKFINQSGLSNNFCSFH

SEQ ID NO: 432 - DNA, 1020 bp, Oryza sativa
atggagagcttgtgtgggcagcttgagcatgaacatgagcagcagctgcaccaatcctcctcatcttcacttctcccctactgcttcctttctgctccagagcctcttcctgtcccaggcttccctgccggctgcagcaaccttgaagagaaggcagcagcagccatggcggcctatgagtatgagagcagcagctgcagctcccttgaccccacctcaatgccaatggtgtactcaccaatagtgctgcagccacaggagtgccctctttcctttgtctttgacaatgccgctgccgctgccggcgacaacaaatgggtgcctggcattcaaggaagttgcccttgttcattgggctcaactcaagatatggatgcaagttggggcaagagtagaaagcacaagaggagcaatgtgggcttgaagggacttgaggagaaaaaggcaagaagggtggtactacatcaacatgatgatgatgtgaagaagaaggccaaggaggcagcaggtggggagccaccagctgggtacattcatgtgagggcaaggagaggccaagcaacagacagccacagccttgctgagagggtgagaagggagaagatcagtgagaggatgaagatgctgcaaagcctggttcctggttgtgacaaggtcacagggaaagccctcatgctagatgagatcatcagctatgtgcaatctctgcagaaccaagttgagtttctgtccatgaagcttgcctcccttagccctttgatgtatgagtttggaccgggcattgatatgcacccagatgttcttcgacagcttgcaaagatgccacatgagatggtgcagtgcatgggccaaatggggagtacaggcatttcactccaaggactaggaggaggacccacaggctttgctcaggatggcagcagccacattaacatggtggtgatgcaagttggagagcaaggccagcagcagggctctcttcaccaggtcgagatgagcagccactgcttctttcattag

SEQ ID NO: 433 - protein, 339 aa, Oryza sativa
MESLCGQLEHEHEQQLHQSSSSSLLPYCFLSAPEPLPVPGFPAGCSNLEEKAAAAMAAYEYESSSCSSLDPTSMPMVYSPIVLQPQECPLSFVFDNAAAAAGDNKWVPGIQGSCPCSLGSTQDMDASWGKSRKHKRSNVGLKGLEEKKARRVVLHQHDDDVKKKAKEAAGGEPPAGYIHVRARRGQATDSHSLAERVRREKISERMKMLQSLVPGCDKVTGKALMLDEIISYVQSLQNQVEFLSMKLASLSPLMYEFGPGIDMHPDVLRQLAKMPHEMVQCMGQMGSTGISLQGLGGGPTGFAQDGSSHINMVVMQVGEQGQQQGSLHQVEMSSHCFFH

SEQ ID NO: 434 - DNA, 876 bp, Oryza sativa
atggcagacttctcaccacaccactctctcctcctcaaggctactgctgctggagcagccatcgccaccaccaatgaccccaacatctcaagcttcttcctctacaaccacagccatggctcccaagctccacaacctgccaatgcagcagcagcagccattgtggaggatgcctcattggagagctcagtgtctgcagttcttgacacctctccatctgtggacaggaagaggaaggcagcagaagacagtgcacactccaaggatagctgcaaggatggcaagagcaggagagggaagaaggccagcaaagaagtggaggagaagagcaccactgaagatgagcctccaaaagggtacatccatgtgagggcaaggagaggacaggcaactgatagccacagccttgcagagagggtgaggagggagaggatcagtgagaggatgaggatgctgcaagcactggtccctggttgtgacaaggttactggaaaggctctcattttggatgagatcatcaactatgtacagtcgttgcagaaccaagttgagttcctatccatgaggattgcttcaatgagcccagtgttgtatggctttggaatggacagcgatggcctccatgaccaaaagattggaggcatgttccaagaagcccttgcaatgcctaatccagtactgaaccaatcaagcccagctccatctcaagctatcatggacacaacctcaaccacatcctactcactgcaaagccagcatggagccatctctttctctcaggacaatggcagttacctgatgcaagcagtgggggagccaaggcagcaggagatgctcaatcaattggtgttcaacaacatgtgctctttccagtag

SEQ ID NO: 435 - protein, 291 aa, Oryza sativa
MADFSPHHSLLLKATAAGAAIATTNDPNISSFFLYNHSHGSQAPQPANAAAAAIVEDASLESSVSAVLDTSPSVDRKRKAAEDSAHSKDSCKDGKSRRGKKASKEVEEKSTTEDEPPKGYIHVRARRGQATDSHSLAERVRRERISERMRMLQALVPGCDKVTGKALILDEIINYVQSLQNQVEFLSMRIASMSPVLYGFGMDSDGLHDQKIGGMFQEALAMPNPVLNQSSPAPSQAIMDTTSTTSYSLQSQHGAISFSQDNGSYLMQAVGEPRQQEMLNQLVFNNMCSFQ

SEQ ID NO: 436 - DNA, 849 bp, Oryza sativa
atggcaggcttctcacacctcccacagcagatggagcatggcctcatcaccaacaatggcttcctcttctgccatggcagccatggaggagcagcaaccaccacagctccagccatccctgaagatgcctcaatggagacctcatctgtggttcttgacacctctccacaggacaagaagaggaagcccagggaagaagacactgccagcctcaactctgctcactccaaggaggcaaaggagaatggcaggaagaggggagggaagaaacacagcagggatcagatggaggaggaggcacctcaggggttcatccatgtcagggcaaggagagggcaagcaacagatagccacagccttgcagagagggtgaggagagaaaggatcagtgagaggatgaggatgctgcaggctctggtccctggttgtgacaaggtcactggaaaggctctcattttggatgagatcatcaactatgtgcagtccttacagaaccaagttgagttcctttccatgaggattgcatctctgagccctgtgctgtatgggtttggcatagacagtgatgctttcagtgaccactctcagaagatggaaggaatgttccatgaggcagttgcaataccagcttctgtcctgaacagaggtagtagcccagctcaatctcatgccatcatggacacatcaaacacctctcctacaccctacacacttcaagtccagggaggcagcaacaacaactctctctcccaggacaatggcagctacatcatgcaaacagtaggggagccaaggcaagaactgttcaatcaagtggtgctcaataattacatgtgctctttccagtag

SEQ ID NO: 437 - protein, 282 aa, Oryza sativa
MAGFSHLPQQMEHGLITNNGFLFCHGSHGGAATTTAPAIPEDASMETSSVVLDTSPQDKKRKPREEDTASLNSAHSKEAKENGRKRGGKKHSRDQMEEEAPQGFIHVRARRGQATDSHSLAERVRRERISERMRMLQALVPGCDKVTGKALILDEIINYVQSLQNQVEFLSMRIASLSPVLYGFGIDSDAFSDHSQKMEGMFHEAVAIPASVLNRGSSPAQSHAIMDTSNTSPTPYTLQVQGGSNNNSLSQDNGSYIMQTVGEPRQELFNQVVLNNYMCSFQ

SEQ ID NO: 438 - DNA, 702 bp, Petunia hybrida
atgagttctgctcattctaagaatgtaagagagggagatcatggaaaaaagaagaaaaacaatagccaagtatcgaaagatgctaaagagaaaaagggaagtgatgacaacaagaaagaggagaacaaatctcctgaagaggcacctactggctacattcatgttagagcaagaaggggccaggcaactgacagccatagtcttgctgaaagggtgaggagagagaaaataagtgaaaggatgaagatactgcaatcgcttgttcctggttgtgacaaggtaactgggaaggccctcatgttggatgaaataattaattatgtccaatctttgcaaaaccaagttgagtttctctccatgaaacttgcttcttcaaatccaatgtactatgactttggcatggacttagatgcactcatggtcagacctaaccagaatttgggtggtttggagacaccactgccaaacattcagcaaaccagcattactgatactacaccacaggcagctgcagtcattcctaacattaataatggctatcctttcttggataattcagcctcacttttgtttcaacaagcccatttccctaattccaattctcagggtaatggacagctcttatggggtgcggatgaccaaagacaaaaaattactattgatcagtcaggattcagcaacaacttttgttctttccattaa

SEQ ID NO: 439 - protein, 233 aa, Petunia hybrida
MSSAHSKNVREGDHGKKKKNNSQVSKDAKEKKGSDDNKKEENKSPEEAPTGYIHVRARRGQATDSHSLAERVRREKISERMKILQSLVPGCDKVTGKALMLDEIINYVQSLQNQVEFLSMKLASSNPMYYDFGMDLDALMVRPNQNLGGLETPLPNIQQTSITDTTPQAAAVIPNINNGYPFLDNSASLLFQQAHFPNSNSQGNGQLLWGADDQRQKITIDQSGFSNNFCSFH

SEQ ID NO: 440 - DNA, 1080 bp, Populus trichocarpa
atggcagccttttcgtatcagcacccacctttatttcttgactcagttatcttgccaaacattaccacacctattatgaacatgaacaacagcatgtattggttttatgatgaagctggaggcatcaataccaacagtttttatcaagtttaccctcctgaaacttttcatgaagctcctcttgatgttagattccatgaatttagccatcatgatcatagctctaaggtgtctcttagtgataatgagacttccttgactaaaaaacagagcacaggctcctcaactgtggttgataagcttgaaactggtgagcaagttactcaagaagtgacgcccgtggacaggaagaggaaaactactaatgggtccttgaattctgctcaatcaaaggatgttaaagaagtgaaaagcaagagacaaaagaaatgcagaggtgacatgaaacaagaagagaagaggccaaaagccgtgaagaaagttcctgaagagcctccaacaggctacgttcatgtaagagcaaggaggggccaagcaacagatagccacagccttgcagagagggtaagaagagagaaaatcagtgagagaatgaagatgctacaacgccttgttcctggctgtgacaaggtaactgggaaggcccttatgttggatgagattattaattatgttcagtccctacaaaatcaagtggagttcttatccatgaagcttgcctctgttaatcccatgttctatgattttggaatggagcttgatgcattcatggtcagaccagagagattaagtagcatgtctccaccactgccatctctgcagcaatgcagtccaatccaacccacagcttttgctgacgccgccgccgccgccaccaccaccgctactcctactacctcctttgctacagcaaataactatcctcttattgataattcaacttcacttttacttcaaggaatgaggccttctgccttcactactgaggatagttgtaacctaatgtgggatgtggatgagcgaagacaaaagtttcttagtccatctgggctcaccagcaacctgtgttctttccattaa

SEQ ID NO: 441 - protein, 359 aa, Populus trichocarpa
MAAFSYQHPPLFLDSVILPNITTPIMNMNNSMYWFYDEAGGINTNSFYQVYPPETFHEAPLDVRFHEFSHHDHSSKVSLSDNETSLTKKQSTGSSTVVDKLETGEQVTQEVTPVDRKRKTTNGSLNSAQSKDVKEVKSKRQKKCRGDMKQEEKRPKAVKKVPEEPPTGYVHVRARRGQATDSHSLAERVRREKISERMKMLQRLVPGCDKVTGKALMLDEIINYVQSLQNQVEFLSMKLASVNPMFYDFGMELDAFMVRPERLSSMSPPLPSLQQCSPIQPTAFADAAAAATTTATPTTSFATANNYPLIDNSTSLLLQGMRPSAFTTEDSCNLMWDVDERRQKFLSPSGLTSNLCSFH

SEQ ID NO: 442 - DNA, 912 bp, Panicum virgatum
atggcggacttctcatcgcaccactctctcctcctcaagatgcctgcagctttgaccaatggccactcccacaacctctcaagcctcttgttctacggccaaaaccatggccaaggagcaacggcgaatgcaaatgcagcgtctggaacagcagcggccatggcggaggacgcttcgcttgagagctcctctgcagtggttgacacctcccctcagggaagtgcatctccaatggacaggaagaggaaggccacagaggacagtgccacgttgagctctgctcactccaaggattgcaatcaggagggcaagagcaagagagggaagaggtccaacaaggaggctgaggagaagagcaccactgatgatgaggcccccaaggggtacatccatgtgagggcaaggaggggtcaggcaacagacagccacagccttgcagaaagggtgaggagagagaggatcagtgagaggatgaggatgcttcaagcattggtccctggctgtgacaaggttactggaaaggccctgattttggatgagatcatcaattatgtgcagtccttgcagaaccaagttgagttcctttccatgaggattgcctctatgagcccagttttgtatgggtttggactggacagtgatggccttcatgaccatgcacaaaagatgggaggcatgttccaagaagcccttgcaatgcctggtccagtgctgagccaagctagcccagctccatcacaagccatcatagagactacttccaccacacccttctcactccagggccagggtgccgtctctttctctcaggacaacggcagcacttacctgatgcaacaagcagtgggggagccaacaaggcaggagctgctcaaccagttggtgttcaacaacatgtgctctttccagtag

SEQ ID NO: 443 - protein, 303 aa, Panicum virgatum
MADFSSHHSLLLKMPAALTNGHSHNLSSLLFYGQNHGQGATANANAASGTAAAMAEDASLESSSAVVDTSPQGSASPMDRKRKATEDSATLSSAHSKDCNQEGKSKRGKRSNKEAEEKSTTDDEAPKGYIHVRARRGQATDSHSLAERVRRERISERMRMLQALVPGCDKVTGKALILDEIINYVQSLQNQVEFLSMRIASMSPVLYGFGLDSDGLHDHAQKMGGMFQEALAMPGPVLSQASPAPSQAIIETTSTTPFSLQGQGAVSFSQDNGSTYLMQQAVGEPTRQELLNQLVFNNMCSFQ

SEQ ID NO: 444 - DNA, 846 bp, Sorghum bicolor
atggcaagcttcccacacttcacgcagatggagcatggcctagccggtgcctccgcccatggcacgccgagcttcttattctgccatggcgcagccacggcagattcagcctcgctggagacctcatctggtgttctcgacacctccccacaaggcactgcttctgacgacaagaagcccaggaagcccagggaagatagtgccagcttcagctctgctcactccaaggactcaaactcaaaggaaagcaccaaaaagaagggaggaaaaagagacagaagcagcaaggaggtagatgaggaggagcccaaggggtacatacatgtcagggcaaggagagggcaagccacagacagccacagccttgcagagagggtgaggagggagagaatcagtgagaggatgagggtgctgcaggccctggtccctggctgtgataaggtcactggtaaagccctcattttggatgagatcatcaattatgtgcagtccttgcagaaccaagttgagttcctttccatgaggattgcttcactgagccctgtgctgtatggttttggcatggacactgatgctttcagtgaccatactcaaaaaatcgaaggaatgctccaccatgaggctcttggaatgcctagctctgtcctgaacagacctccatctgaaactcacatggacacgcacaactccacctcctccccatcctacgaggtccacggcgatggcggcaccagcatctctttccctcaggacaatggcagctacatggtgcaaacagtaggtgagccaaggcaagagctgttcaatcaagtggtgttcagtaaccacatgtgctctttccagtag

SEQ ID NO: 445 - protein, 281 aa, Sorghum bicolor
MASFPHFTQMEHGLAGASAHGTPSFLFCHGAATADSASLETSSGVLDTSPQGTASDDKKPRKPREDSASFSSAHSKDSNSKESTKKKGGKRDRSSKEVDEEEPKGYIHVRARRGQATDSHSLAERVRRERISERMRVLQALVPGCDKVTGKALILDEIINYVQSLQNQVEFLSMRIASLSPVLYGFGMDTDAFSDHTQKIEGMLHHEALGMPSSVLNRPPSETHMDTHNSTSSPSYEVHGDGGTSISFPQDNGSYMVQTVGEPRQELFNQVVFSNHMCSFQ

SEQ ID NO: 446 - DNA, 882 bp, Sorghum bicolor
atggcggacttctcacagaacgactcgctcctcctcaagatgcctagccactccccaaacttctcaagcctcctgttctacggccacaaccatggcgaagcagcagctcctgcaaatgcaaatgcaatggtagaagacgcctcacttgagagctcttctgctgtggttgacacctccccacaggacagtgcatctccaatggagaggaagaggaaggctacagaagacagtgctacactgagttctgctcaatccaaggattgcaagcagcaggagagcaagagcaagagggggaagaggcccaacaaggagactgaggagaagagcaccactgaagatgaggccaccaaggggtacatccacgtgagggcaaggaggggtcaggcaacagacagccacagccttgcagagagggtgaggagagagaggatcagtgagaggatgaggatgctgcaagcactggtccctggttgtgacaaggttactggaaaggccctgattttggatgagattatcaattatgtgcagtccctgcagaaccaagttgagttcctttccatgaggattgcctccatgagcccagtgctatatgggtttggactggacagtgatggcctccatgatcacgcacaaaagatgggaggcatgttccaagaagcccttgcaatgccaggtccagtgctgagccaagctagcccagctccatctcaagccatcatggacaccacctccaccacaccctactcactgcaaggccagggttccatctctttctctcaggaaaatggcagcacttacctgatgcagcaagcagtgggggagccaacaaggcaggagctgctcaaccagttggtgttcaacaacatgtgctctttccagtag

SEQ ID NO: 447 - protein, 293 aa, Sorghum bicolor
MADFSQNDSLLLKMPSHSPNFSSLLFYGHNHGEAAAPANANAMVEDASLESSSAVVDTSPQDSASPMERKRKATEDSATLSSAQSKDCKQQESKSKRGKRPNKETEEKSTTEDEATKGYIHVRARRGQATDSHSLAERVRRERISERMRMLQALVPGCDKVTGKALILDEIINYVQSLQNQVEFLSMRIASMSPVLYGFGLDSDGLHDHAQKMGGMFQEALAMPGPVLSQASPAPSQAIMDTTSTTPYSLQGQGSISFSQENGSTYLMQQAVGEPTRQELLNQLVFNNMCSFQ

SEQ ID NO: 448 - DNA, 567 bp, Saccharum officinarum
  misc_feature (411)..(411): n is a, c, g, or t
atggcaagctttccacacctcacgcagatggagcatggcctagccggtgcctcccatggcacgccgagcttcttattctgccatggcgcagccatggcagattcagcctcgctggagacctcatctggtgttctcgacacctccccacaaggcactgcttctgacgacaagaagcccaggaagcccagggaagatagtaccagcttcagctctgctcactccaaggactcaaactcaaaggaaagcaccaaaaagaggggaggaaaaagagacagaagcagcaagaaggtagatgaggagcccaaggggtacatacacgtcagggctaggagagggcaagccacagacagccacagccttgcaaagagggtgaggagggagagaatcagtgagaggatgagggtgctgcangccctggtccctggctgtgataaggtcactggaaaagccctcattttggatgagattatcaattatgtgcagtccttgcagaaccaagtagagttcctttccatgaaggattgcttccctgagccctgtgctgtatggttttggcatggacagtga

SEQ ID NO: 449 - protein, 188 aa, Saccharum officinarum
  misc_feature (137)..(137): Xaa can be any naturally occurring amino acid
MASFPHLTQMEHGLAGASHGTPSFLFCHGAAMADSASLETSSGVLDTSPQGTASDDKKPRKPREDSTSFSSAHSKDSNSKESTKKRGGKRDRSSKKVDEEPKGYIHVRARRGQATDSHSLAKRVRRERISERMRVLXALVPGCDKVTGKALILDEIINYVQSLQNQVEFLSMKDCFPEPCAVWFWHGQ

SEQ ID NO: 450 - DNA, 702 bp, Triticum aestivum
atggcaggattctcacacctcccccagcagatggagtatggcctcgccaatgccggcagcttcttgctctgccatggcaaccctgaggatgcagccgcctcactggagggctcgtctggtgttcttgacactcctcttgtggccactgcttctgtggagaagaagaggaagcccaaggaagacactgccagcctcaactctgcccactccaaggaaaccaaggagagtaccaggaagaggggaggcaaaaagcagggcaaggagatggatgaggaggaggaggaaccaaaggggtacatccatgtgagggcaaggagagggcaggcaacagatagccacagcctttcagagagggtgaggagggagaggatcagtgagaggatgaggatgctgcagtccctggtccctggctgtgacaaggtcactgggaaggctctcattttggatgagatcatcaactatgtgcagtcactgcaaaaccaagttgagttcctgtccatgaggattgcttccctgagccctgtggtgtatggttttggcatggagagtggggctgccttcagtgaccaatcacaaaagattgaaggcatgttccatgacgcagcggcattgcctactggtcctcccatgaacagatcatctagcccagctccatctcaggccatgatggacaaaggaacctcctcctccttccaaccttag

SEQ ID NO: 451 - protein, 233 aa, Triticum aestivum
MAGFSHLPQQMEYGLANAGSFLLCHGNPEDAAASLEGSSGVLDTPLVATASVEKKRKPKEDTASLNSAHSKETKESTRKRGGKKQGKEMDEEEEEPKGYIHVRARRGQATDSHSLSERVRRERISERMRMLQSLVPGCDKVTGKALILDEIINYVQSLQNQVEFLSMRIASLSPVVYGFGMESGAAFSDQSQKIEGMFHDAAALPTGPPMNRSSSPAPSQAMMDKGTSSSFQP

SEQ ID NO: 452 - DNA, 918 bp, Zea mays
atggcaagcttattcccacagctcgcgcagatggagcacggcgtagccggcgcctcccatggcgcgccgagcttcctgttctgcaatggcgcaggtgcagccacggcagactcagcctcgctagagacctcgtccggtgttctcgacacctccccacgaggcggaggcgctgattctggcggtaggaaggccccgacgaagcccagggaagacagcgccagcgccagcgccagcttcagcttcagctctgcgcactccaaggactcgagctcgaagggaagcaccaagaataggggagggaaaagaggcagaagcagcaaggaggtagacgaggaggaggagcccaaggggtacatacacgtcagggcaaggagagggcaagccacggacagccacagccttgcggagagggtgaggagggagaggatcagcgagaggatgagggtgctgcaggccctggtccctggctgtgataaggtcactggaaaagccctcgttttggacgagatcatcaactacgtgcagtccttgcagaaccaagtcgagttcctttccatgaagatcgcttcactgagccctgtgctgtatggctttggcatggacactactgacgctttcagcactgaccatactactcaaaaaatcgaagggatgctccagctccaccacgaggcgcttgcggtgcctagctctgccctgagcagacctccattcgaggctatcgcggacagtacgcacgccaccgcctctgcctcctccccccggtcctacgagctccacggcgatggcggcggcggcggcgccagcatctctttcccgcaggacggcggcggctacatggcgcaaacagtaggtgggccaaggccagagctgttcaaccaagtggtgttcagtaaccacatgtgctctttccagtag

SEQ ID NO: 453 - protein, 305 aa, Zea mays
MASLFPQLAQMEHGVAGASHGAPSFLFCNGAGAATADSASLETSSGVLDTSPRGGGADSGGRKAPTKPREDSASASASFSFSSAHSKDSSSKGSTKNRGGKRGRSSKEVDEEEEPKGYIHVRARRGQATDSHSLAERVRRERISERMRVLQALVPGCDKVTGKALVLDEIINYVQSLQNQVEFLSMKIASLSPVLYGFGMDTTDAFSTDHTTQKIEGMLQLHHEALAVPSSALSRPPFEAIADSTHATASASSPRSYELHGDGGGGGASISFPQDGGGYMAQTVGGPRPELFNQVVFSNHMCSFQ

SEQ ID NO: 454 - DNA, 960 bp, Zea mays
atggcggacgcggacctgacaccaaaccactcgctcctcctcaagatgcctgcggcttcggcccacgcccactccccaagcctctcgagcctcctgttatacggccaggagagccatggcgaagcagcgcctgcaaacgcaaatgcaaatgcggcagcagcaacggtggaggacgccgcctcacttgagacctcttctgcagtggttgacagtgcatctccaatggagaggaagaggaaggctacagcagaagacagtgctgcaatcagctctcctcaaccaaaggactgcaagcaggagagcaagagcaggagggggaagaggccccgaaaggagaccgaggagaagagcagcactgatgaagacgaggcctccaaggggtacatccatgtgagggcgaggaggggccaggcgacagacagccacagcctcgcagagagggtgaggagagagaggatcagcgagaggatgaggatgctgcaggcactggtccctggctgcgacaaggttactggaaaggccatggttttggacgagatcatcaattacgtgcagtccctgcagaaccaggtcgagttcctttccatgaggattgcctccatgagcccagtgctgtacgggttcggaacgaacagtgaaggccttcatgatcatcacgcaccaaagatgggaggggtgtcgttccaggaagccgccattgcagtgccagcaggtccagcggcagcggtgagccaagctagcagtaggccggctccatctgaagccaccatgaacaccgcttgcactaccacgccctactcagtctcactgcaggcccaggcttccatctcattctctccctctcaggaaaacggcggcacttattacctggtgcagcaagcggtgggggagcaggcaacgaggcaggaggagctgctgctgagccagttggtgttcagcaacatgtgctcgttccagtag

SEQ ID NO: 455 - protein, 319 aa, Zea mays
MADADLTPNHSLLLKMPAASAHAHSPSLSSLLLYGQESHGEAAPANANANAAAATVEDAASLETSSAVVDSASPMERKRKATAEDSAAISSPQPKDCKQESKSRRGKRPRKETEEKSSTDEDEASKGYIHVRARRGQATDSHSLAERVRRERISERMRMLQALVPGCDKVTGKAMVLDEIINYVQSLQNQVEFLSMRIASMSPVLYGFGTNSEGLHDHHAPKMGGVSFQEAAIAVPAGPAAAVSQASSRPAPSEATMNTACTTTPYSVSLQAQASISFSPSQENGGTYYLVQQAVGEQATRQEELLLSQLVFSNMCSFQ

SEQ ID NO: 456 - DNA, 864 bp, Zea mays
atggcaagcttcccacacctcacgcagatggagcatggcctagccagtggtgcctcccatggcacgccgagcttcttcttctgccatggcacagccacggcggattcagcctcgctggagacctcgtctggtgttctcgacacctccccacgaggcacttcttctgacgacaacaaggcctgcaggaagcacaaggaagatagtggtgccagcttcagctctgctcgctccaaggactcaaactcaaaggaaagcagcaaaaggagcggaggaaaaagagacagaagcagcaagaaggtggacgaggaggagcccaaggggtacatacatgtcagggcgaggagaggacaagcaacggacaaccacagccttgcagagagggtgaggagggagagaatcagtgagaggatgagggtgttgcaggccctggtccctggctgtgataaggtcactggaaaagccctcattttggacgagatcatcaattatgtgcagtccttgcagaaccaagttgagttcctttccatgaggattgcttccctgagccctgtgctgtatggttttggcatggacagtagtgatgctttcagtgaccttataactcagaagatcgaagggatggcccaccatgaggcgttcgcgatgcctagcagctctgtcctgaacggcactccgtcggaagctctcgtggacacgcacacctccagctcctccccgtcctacgaggtccacggcgacggcggcaccgccagcgtctctttccctcaggacagtggcagctacatggtgcaaacagtaggtgagccaaggcaagagctgttcagccaagtggtgttcagtaaccacatgtgccctttccagtag

SEQ ID NO: 457 - protein, 287 aa, Zea mays
MASFPHLTQMEHGLASGASHGTPSFFFCHGTATADSASLETSSGVLDTSPRGTSSDDNKACRKHKEDSGASFSSARSKDSNSKESSKRSGGKRDRSSKKVDEEEPKGYIHVRARRGQATDNHSLAERVRRERISERMRVLQALVPGCDKVTGKALILDEIINYVQSLQNQVEFLSMRIASLSPVLYGFGMDSSDAFSDLITQKIEGMAHHEAFAMPSSSVLNGTPSEALVDTHTSSSSPSYEVHGDGGTASVSFPQDSGSYMVQTVGEPRQELFSQVVFSNHMCPFQ

SEQ ID NO: 458 - DNA, 948 bp, Zea mays
gtctctcaaaatgtgtaaacaaacagcaggctcgatctacttgctactgctctctccaaatccagacaaggggatggactagatccaacatctcaaactcatctggtacgtgcatgctcctaccaaatctcgcagcattatttccttcctattgtcaatgtggggtccattcctcgcttcctctcacccaaatgctccccacccctactggaaagagcacatgttgttgaacaccaactggctgagcagctcctgctgccttgttggctcccccgctgcttgctgatgctgcatcaggtaagtgctgctgccattgtcctgggaaaaagagatggaaccctggccatggccatgcagtgagtaaggtgtggtggtgtccatgatggcttcagatggagctgctgggctggcttggctcagcactggacctgccattgcaagggcttcctggaacatgactcccatcttttgtgcgtggtcatggaggccatcactatccagtccgaacccatatagcactgggctcatggaggcaatcctcatggaaaggaactcaacttggttctgcagggactgcacatagttgataatctcatccagaatcagggcctttccagtaaccttgtcacaaccagggaccagtgcttgcagcatcctcatcctctcactgatcctctctctcctcaccctctctgcaaggctgtggctgtccgttgcctgacccctcctcgccctcacatggatgtaccccctggtggcctcgtcttcagtagcgctcttctcctcagtattagcctccttgttgtggggcctctttccccgcctgctcttgctctcctgctgctgcttgcaatcctccttggattgagcagagctgagtgtagcactgtcttctgcaggcttcctcttcctctccatcggagacgcagcagcagcactgccctgtgg

SEQ ID NO: 459 - protein, 315 aa, Zea mays
MAGFSRPNNSLLLKMPATLASSHTPNLSSLLFYDQNHGQAVNANAAAMMVEDDASLQSSSAVVDTSPQPQGSAAAASPMERKRKPAEDSATLSSAQSKEDCKQQQESKSRRGKRPHNKEANTEEKSATEDEATRGYIHVRARRGQATDSHSLAERVRRERISERMRMLQALVPGCDKVTGKALILDEIINYVQSLQNQVEFLSMRIASMSPVLYGFGLDSDGLHDHAQKMGVMFQEALAMAGPVLSQASPAAPSEAIMDTTTPYSLHGHGQGSISFSQDNGSSTYLMQHQQAAGEPTRQQELLSQLVFNNMCSFQ

SEQ ID NO: 460 - DNA, 861 bp, Zea mays
atggcaagcttcccacacctcacgcagatggagcatggcctagccagtggtgcctcccatggcacgccgagcttcttcttctgccatggcacagccacggcggattcagcctcgctggagacctcgtctggtgttctcgacacctccccacgaggcacttcttctgacgacaacaaggcctgcaggaagcacaaggaagatagtggtgccagcttcagctctgctcgctccaaggactcaaactcaaaggaaagcagcaaaaggagcggaggaaaaagagacagaagcagcaagaaggtggacgaggaggagcccaaggggtacatacatgtcagggcgaggagaggacaagcaacggacaaccacagccttgcagagagggtgaggagggagagaatcagtgagaggatgagggtgttgcaggccctggtccctggctgtgataaggtcactggaaaagccctcattttggacgagatcatcaattatgtgcagtccttgcagaaccaagttgagttcctttccatgaggattgcttccctgagccctgtgctgtatggttttggcatggacagtagtgatgctttcagtgaccttataactcagatcgaagggatggcccaccatgaggcgttcgcgatgcctagcagctctgtcctgaacggcactccgtcggaagctctcgtggacacgcacacctccagctcctccccgtcctacgaggtccacggcgacggcggcaccgccagcgtctctttccctcaggtttgccttcaatctgttcgtttccatctacgtaccagtaccacacgtgatcattcaggattattcgtgagctccaaagtatcgtggtcagtttag

SEQ ID NO: 461 - protein, 286 aa, Zea mays
MASFPHLTQMEHGLASGASHGTPSFFFCHGTATADSASLETSSGVLDTSPRGTSSDDNKACRKHKEDSGASFSSARSKDSNSKESSKRSGGKRDRSSKKVDEEEPKGYIHVRARRGQATDNHSLAERVRRERISERMRVLQALVPGCDKVTGKALILDEIINYVQSLQNQVEFLSMRIASLSPVLYGFGMDSSDAFSDLITQIEGMAHHEAFAMPSSSVLNGTPSEALVDTHTSSSSPSYEVHGDGGTASVSFPQVCLQSVRFHLRTSTTRDHSGLFVSSKVSWSV

SEQ ID NO: 462 - DNA, 1044 bp, Arabidopsis lyrata
atggacgagtttgccgcaaagaagaaggatttggtcaatacgcctgtggatttgtatcctccggagaatccaatgtcgggtccttctcagatgatggattcattcagagaaactctttggaacgatggtggtttcaatgtccacacagatgcaggcacttcctttagagaatcagctggcttgtttcttcaagatacaatgattcctagtggatccaaactagataatggttctcttaaggatgcatctaagttggtgaaagacagatcgattaatgtatcagaggattctcaatctagtggatgtaatggtcatgatgatgctaaatgtggggtaacgtcttccaaggggtttaacagtaagaagaggaaaagaattgggaaggattgtgaaggagaagaagataaaatgcagaaggatgagcaaagttcaaattcaaatgttaacaagacaaacagtgagaaacaagcttctgattctttaaaggatgggtatattcacatgagggcacggagaggccaggctacaaatagtcacagtcttgcagaaagagtaaggagagaaaaaatcagtgaaaggatgaagttcttgcaagatcttgtaccgggttgcgacaaggtgactgggaaggcagttatgctcgacgaaattattaactatgtgcaatcacttcaatgccagatcgagtttttatcgatgaaactttcagctgtgaatcctgtgctcgattttaacctcgaaagcctccttgcaaaagatgctcttcaatcatctgcaccgacatttccccaaaacatgtcgatgctttatcctcctctatcatatctctctcaaacaggattcatggaacccaaccgttcctcaatgtcgctattgaatgggggattaaaacggcaggaaacacatggatacgaaagtgatcaccacaatgttgtccacatgaaccatgaaacgggcactgcacctgatcatgaagacgcaacaggtgaaagtaaaagccctatactttcctactgttgtaaccagatacttaaaaaccgctaa

SEQ ID NO: 463 - protein, 347 aa, Arabidopsis lyrata
MDEFAAKKKDLVNTPVDLYPPENPMSGPSQMMDSFRETLWNDGGFNVHTDAGTSFRESAGLFLQDTMIPSGSKLDNGSLKDASKLVKDRSINVSEDSQSSGCNGHDDAKCGVTSSKGFNSKKRKRIGKDCEGEEDKMQKDEQSSNSNVNKTNSEKQASDSLKDGYIHMRARRGQATNSHSLAERVRREKISERMKFLQDLVPGCDKVTGKAVMLDEIINYVQSLQCQIEFLSMKLSAVNPVLDFNLESLLAKDALQSSAPTFPQNMSMLYPPLSYLSQTGFMEPNRSSMSLLNGGLKRQETHGYESDHHNVVHMNHETGTAPDHEDATGESKSPILSYCCNQILKNR

SEQ ID NO: 464 - DNA, 1464 bp, Arabidopsis lyrata
atggatttaagtgagaaagatgagttttcagcagagaagaggaatcctgataactatgattcggttaataatccgtctggagattggcgagttgattcatatccttcagagaatctgatatcagctggtcctgcgtcttgttctccatctcagatgatggattcatttgggcaaactctttggtatgatcccactagtgttcaggctatgggttatggcggttttaatggtggtaatgcttcgtcttcttcgtttaggggtaatattgatagatctcttgaaatgggttggaacttgcctaatttgttgcctcctaaaggcaatggtcttttcctgccgaatgcgagtactttccttcctccgagtatggctcagttcccggctgattcagggttcatagagcgtgctgcgaggttttcgctttttagtggtgggaattttagtgatatggtgaatcaaccacttgggaatcctgagtcgattggtttgtttcttcaaggtggtggaacaatgcaagggcagtgtcaatgtgatgaacttaatgttggtgaacctcacaatgatgtatctacagcagtgaaagacccaactgttagatcttgtgaacaagctaaaccgaatgttcctggatcgggcaatgtatccgaggatactcagtctagtggtggtaacggtcggaaaggtagagaaacttcttccaacacaaagaagaggaaaagaaatgggcaggtgaattctgaagcagctcagtcacacagatctcagcaatctgaggaagaaccagacaataatggtgataaaaagcggaatagtgagcaaagtccaaattcacctggaaacaagacaaacagtgggaaacgacaaggcaaacaaagttctgatcttccaaaagatggatatattcatgtgcgggcacgaagaggccaggctacaaatagccatagtcttgcagaaagagttaggagagaaaaaattagtgaaaggatgaagtttcttcaagatcttgtaccgggttgcaacaaggtgactgggaaggcagttatgcttgacgaaatcataaactacgtacaatcactacaacgccaagttgagtttttatcgatgaaacttgcaactgtgaacccacaaatggactttaaccttgaaggtcttcttgcaaaagatgcacttcaactacgagctggttcttcatctactacaacaccattcaccccaaatatggcaatggcttatcctcctctaccacatggattcatgcaacaaaccctttccagcatcggaaggaccattagctctccattgtcttctatgaatggtggattcaagcgacaggaaacaaatggatgggagggtgatttgcaaaatgtgatccacattaactatggagctggtgatgtcacacctgaccctcaagcagcagctacagcatctctcccagctgcaaatatgaaggttgagccatga

SEQ ID NO: 465 - protein, 487 aa, Arabidopsis lyrata
MDLSEKDEFSAEKRNPDNYDSVNNPSGDWRVDSYPSENLISAGPASCSPSQMMDSFGQTLWYDPTSVQAMGYGGFNGGNASSSSFRGNIDRSLEMGWNLPNLLPPKGNGLFLPNASTFLPPSMAQFPADSGFIERAARFSLFSGGNFSDMVNQPLGNPESIGLFLQGGGTMQGQCQCDELNVGEPHNDVSTAVKDPTVRSCEQAKPNVPGSGNVSEDTQSSGGNGRKGRETSSNTKKRKRNGQVNSEAAQSHRSQQSEEEPDNNGDKKRNSEQSPNSPGNKTNSGKRQGKQSSDLPKDGYIHVRARRGQATNSHSLAERVRREKISERMKFLQDLVPGCNKVTGKAVMLDEIINYVQSLQRQVEFLSMKLATVNPQMDFNLEGLLAKDALQLRAGSSSTTTPFTPNMAMAYPPLPHGFMQQTLSSIGRTISSPLSSMNGGFKRQETNGWEGDLQNVIHINYGAGDVTPDPQAAATASLPAANMKVEP

SEQ ID NO: 466 - DNA, 1002 bp, Arabidopsis lyrata
atgaatggagctataggaggtgaccttttactcaattgcacggacatgtcggtcctagagcgccaaagggctcacctcaagtatttcaatcccagctttgattctcctctcgccggcttctttgccgattcatcaatgattaacggcggcgagatggacggctatcttgcgactgccggtttgaatcttccgatgatttacggggagacgacggtggaaggtgatccaagaatgtccatttccccagaaactacgcttgggactggaaatttcaagaaaaggaagtttgatacagagactaaggatcgtaatgagaagaagaagaagatgaacagagaagaagtaacagaagaagaagaagaaaagtcgaaaataacagagctaaacaatgggagcccaaaaagcatcaagaagatgaaaaacaaagccaagaaagaagagaacaattgctctaacgattcatctaaagtgacgaaggaattggagaaaacggattatattcatgttcgtgcacgacgaggtcaagccactgatagtcacagcatagcagaacgagttagaagagaaaagattagtgagagaatgaagtttctacaagatttggttcctggatgcgacaagattacaggcaaagcagggatgcttgatgaaatcattaactatgttcagtctcttcagagacaaattgagttcttatcgatgaagctagcagttgtgaatccaaggccggattttgatatggatgacatttttgacaaagaggtaattgtctcaactccaatgactgtggtgccatctcctgaaatggttcactccggttattctcatgagatggttaattccggctattccaatgagatggttaattccggttatcatcatgtcaatccaatgcagcaagcggaaaccagttctgatccactgtcatgcttcaacaatggccaagctccttcaatgtgggactcttatgtgcagaatctttatgggagtttaggagtttga

SEQ ID NO: 467 - protein, 333 aa, Arabidopsis lyrata
MNGAIGGDLLLNCTDMSVLERQRAHLKYFNPSFDSPLAGFFADSSMINGGEMDGYLATAGLNLPMIYGETTVEGDPRMSISPETTLGTGNFKKRKFDTETKDRNEKKKKMNREEVTEEEEEKSKITELNNGSPKSIKKMKNKAKKEENNCSNDSSKVTKELEKTDYIHVRARRGQATDSHSIAERVRREKISERMKFLQDLVPGCDKITGKAGMLDEIINYVQSLQRQIEFLSMKLAVVNPRPDFDMDDIFDKEVIVSTPMTVVPSPEMVHSGYSHEMVNSGYSNEMVNSGYHHVNPMQQAETSSDPLSCFNNGQAPSMWDSYVQNLYGSLGV

SEQ ID NO: 468 - DNA, 1497 bp, Arabidopsis lyrata
atggacaacgagttgtttatgaacacagagtttccaccaccgccggagatggcgacgcatttcgaaccaccaccgtcttcttcatcggcgatgatgcttaactgggctttaatggatccaaatccacctcaagattcttcctttatatgggaaaagtcaacggaacaacaacaacaacaaagcatctttgactctgctttaagctcattagtctcatcaccgacaccgtcaaattccaacttctccggtggtggcggtgatggttttcttatcagagaactcatcggaaagcttggaaacatcgggaataacaataataactccggtgagatctacggaactccgatgtctcgctctgcctcatgttacgcaactccgatgagctctccaccaccaccgacgaatacgaattctcagatgatgatgaatagaacgacgccgttgacggaattctcagcagatccgggttttgcggagagagcttcaagattctcttgttttggtagccggagctttaacggaagaaccaatacaaatcttccgataaacaacggtaataacatcgttaacaactccgggaagctgacacgtgtctcaagtacaccagctcttaaggctcttgtttcaccggaagtcgcacccggcggcgaatttccccggaagagaaaatctgtgcccaaagggaaatccaaagaaaatcccatttccactgcttctccatctcctagtttctcaaagacggcggaaaagaaagaagaatggggtggaaaaggaagtaaaagttcagaagaaaaaggaggaaaaaggagaagagaagatgaagatgaagaagaaggagaaggtgaaggaaacaataacacaaaaccacctgagcctcctaaagattacattcatgttcgagctcgacgaggccaagcgaccgatagtcacagcctcgccgaacgagttcggagggagaaaattggtgaaaggatgaagcttcttcaagatcttgtgcctggatgcaataaggttactggaaaagcactgatgcttgatgaaattataaactatgtacaatcattgcaaagacaagttgagttcttgtcaatgaagttatcatcagtgaacgacaccaggctggattttaacgtggacgctcttgtgtcaaaggatgttatgattccatcaagtaacaaccgattgcatgaagaaggactccaatcaaagtcttcaagtcgtcatcatcaacaacaacaacttaatatgtataatagtaataatgcacaattacttcccaatatttcttccaataacatgatgctccaatctcctatgaactctttggaagcctctaccttagccagaagcttcactcacttaccaacacttacccaattcactgactctatttctcagtatcaaatgtttagcgaagaagatttacaaagcatagtaggaatgggagtggcactaaaccccaacaatgaatctcaacacatgaaaattgagctttga

SEQ ID NO: 469 - protein, 498 aa, Arabidopsis lyrata
MDNELFMNTEFPPPPEMATHFEPPPSSSSAMMLNWALMDPNPPQDSSFIWEKSTEQQQQQSIFDSALSSLVSSPTPSNSNFSGGGGDGFLIRELIGKLGNIGNNNNNSGEIYGTPMSRSASCYATPMSSPPPPTNTNSQMMMNRTTPLTEFSADPGFAERASRFSCFGSRSFNGRTNTNLPINNGNNIVNNSGKLTRVSSTPALKALVSPEVAPGGEFPRKRKSVPKGKSKENPISTASPSPSFSKTAEKKEEWGGKGSKSSEEKGGKRRREDEDEEEGEGEGNNNTKPPEPPKDYIHVRARRGQATDSHSLAERVRREKIGERMKLLQDLVPGCNKVTGKALMLDEIINYVQSLQRQVEFLSMKLSSVNDTRLDFNVDALVSKDVMIPSSNNRLHEEGLQSKSSSRHHQQQQLNMYNSNNAQLLPNISSNNMMLQSPMNSLEASTLARSFTHLPTLTQFTDSISQYQMFSEEDLQSIVGMGVALNPNNESQHMKIEL

SEQ ID NO: 470 - DNA, 1173 bp, Arabidopsis thaliana
atgagtgacaaagacgagtttgccgcaaagaagaaggatttggtcaatacgccagtggatttgtatcctccggagaatccaatgttgggtccttctccgatgatggattcattcagagaaactctttggcatgatggtggtttcaatgtccacacagatgcagacacttcctttagaggtaataataatattgatatacctcttgaaatgggttggaatatggctcagttccctgcagattcaggattcattgagcgtgctgcaaagttttctttttttggatgtggtgaaatgatgatgaaccaacaacaatcatctcttggagttccagattcaactggcttgtttcttcaagatacacagattcctagtggatccaaactagataatggtcctcttactgatgcatctaagttagtgaaagagagatcgattaataatgtatcagaggattctcaatctagtggaggtaatggtcatgatgatgctaagtgtgggcaaacatcttccaaggggtttagtagtaagaagaggaaaagaattgggaaggattgtgaagaagaagaagataaaaagcaaaaggatgagcaaagtccaacttcaaatgcgaacaagacaaacagtgagaagcaaccttctgattctttaaaggatgggtatattcacatgagggcacgaagaggccaggctactaatagtcacagtcttgctgaaagagtaagaagagaaaaaatcagtgaaaggatgaagttcttgcaagatcttgtgccaggttgcgacaaggtgactggtaaggcagttatgctcgatgaaatcattaactatgtgcaatcacttcaatgccaaatcgagtttttatcgatgaaactttcggctgtgaatcctgtgctcgattttaacctcgaaagcctccttgcaaaagatgctcttcaatcatctgcaccgacatttccccacaacatgtcgatgctttatcctcctgtatcgtatctctctcaaacaggattcatgcaaccgaacatttcctcaatgtcgctattgagtggaggattaaaacggcaggaaacacatggatatgaaagtgatcaccacaatcttgtccacatgaaccatgaaaccggcactgcacctgatcatgaagatacaacagctgacatgaaggtggagccgtag

SEQ ID NO: 471 - protein, 390 aa, Arabidopsis thaliana
MSDKDEFAAKKKDLVNTPVDLYPPENPMLGPSPMMDSFRETLWHDGGFNVHTDADTSFRGNNNIDIPLEMGWNMAQFPADSGFIERAAKFSFFGCGEMMMNQQQSSLGVPDSTGLFLQDTQIPSGSKLDNGPLTDASKLVKERSINNVSEDSQSSGGNGHDDAKCGQTSSKGFSSKKRKRIGKDCEEEEDKKQKDEQSPTSNANKTNSEKQPSDSLKDGYIHMRARRGQATNSHSLAERVRREKISERMKFLQDLVPGCDKVTGKAVMLDEIINYVQSLQCQIEFLSMKLSAVNPVLDFNLESLLAKDALQSSAPTFPHNMSMLYPPVSYLSQTGFMQPNISSMSLLSGGLKRQETHGYESDHHNLVHMNHETGTAPDHEDTTADMKVEP

SEQ ID NO: 472 - DNA, 1461 bp, Arabidopsis thaliana
atggatttaagtgcgaaagatgagttttcagcagagaagaggaatcctgataactatgattctgttaataatccgtctggagattggcgagttgattcatatccttcagagaatctgatttcagctggtcctgcgtcttgttctccttctcagatgatggattcatttgggcaaactctttggtatgatcccacgagtgttcaggctgttggttatgccggttttaatggtggtaatgcttcgtcttcttcgtttaggggtagtattgatagatctcttgaaatgggttggaatctgcctaatttgttgcctcctaaaggcaatggtcttttcttaccgaatgcgagtagtttccttcctccgagtatggctcagttcccggctgattcaggttttatagagcgtgcagcgaggttttcgctctttagcggtgggaattttagtgatatggtgaatcaaccacttgggaattctgaggctattggtttgtttcttcaaggtggtggaacaatgcaagggcagtgtcaaagtaatgaacttaatgttggtgaacctcacaatgatgtatctgtagcagtgaaagaatcaactgttagatctagtgaacaagctaaaccgaatgttcctggatcgggcaatgtatccgaggatactcagtctagtggtggtaatggtcagaaaggcagagaaacctcttccaacacaaagaagaggaaaagaaatgggcagaagaactctgaagcagctcaatcacacagatcccagcagtctgaggaagaaccagacaacaatggtgatgaaaagcgcaatgatgagcaaagtccaaattcacctggaaagaagtcaaacagtgggaaacaacagggcaaacaaagttctgatcctccaaaagatggatatattcatgtacgggcacgaagaggccaggccacaaatagccatagtcttgcagaaagagttaggagagaaaaaattagtgaaaggatgaagtttcttcaagatctagtaccgggttgcaacaaggtgactgggaaggcagttatgcttgacgaaatcataaactacgtacaatcactacaacgccaagttgagtttttatcgatgaaacttgcaactgtgaacccacaaatggactttaaccttgaaggtcttcttgcaaaagatgcacttcaactacgagctggttcttcatctacaacaccattcccaccaaatatgtcaatggcttatcctcctctacctcatggattcatgcaacaaactctttccagcattggaaggaccattacctctccattgtctcctatgaatggtggattcaagcgacaggaaacaaatggatgggagggtgatttgcaaaatgtgatccacattaactatggagctggtgatgtcacacctgaccctcaagcagcagctacagcatctcttccagctgcaaatatgaaggttgagccatga

SEQ ID NO: 473 - protein, 486 aa, Arabidopsis thaliana
MDLSAKDEFSAEKRNPDNYDSVNNPSGDWRVDSYPSENLISAGPASCSPSQMMDSFGQTLWYDPTSVQAVGYAGFNGGNASSSSFRGSIDRSLEMGWNLPNLLPPKGNGLFLPNASSFLPPSMAQFPADSGFIERAARFSLFSGGNFSDMVNQPLGNSEAIGLFLQGGGTMQGQCQSNELNVGEPHNDVSVAVKESTVRSSEQAKPNVPGSGNVSEDTQSSGGNGQKGRETSSNTKKRKRNGQKNSEAAQSHRSQQSEEEPDNNGDEKRNDEQSPNSPGKKSNSGKQQGKQSSDPPKDGYIHVRARRGQATNSHSLAERVRREKISERMKFLQDLVPGCNKVTGKAVMLDEIINYVQSLQRQVEFLSMKLATVNPQMDFNLEGLLAKDALQLRAGSSSTTPFPPNMSMAYPPLPHGFMQQTLSSIGRTITSPLSPMNGGFKRQETNGWEGDLQNVIHINYGAGDVTPDPQAAATASLPAANMKVEP

SEQ ID NO: 474 - DNA, 1371 bp, Arabidopsis thaliana
atggagaacgagctgtttatgaatgcaggagtttcgcatccgccggtgatgacgtcaccgtcttcttcgtcggcgatgcttaagtgggtttcaatggagactcagccagtggatccaagtctcagtcgcaatctgttttgggaaaagtcaacggaacagagcatttttgattcggctctgagctcactcgtctcttctcctacgccgtcaaattcaaacttttcggttggcggagtaggtggagaaaatgtcattatgagagagctcatcgggaaactgggtaatatcggcgatatctatggaattacggcgagcaatggaaactcgtgttacgcaactccgatgagctctccaccgcctggaagtatgatggagacgaaaacgacgacgccgatggcagaactgtccggcgacccgggattcgctgagagagcggcgaggttctcgtgttttggtagccggagttttaacagcagaacaaactcgccgtttccgattaataacgaaccacccatcacaaccaatgagaaaatgccacgtgtatcaagcagcccagtttttaagcctcttgcgtctcatgttcccgccggcgaatcgtccggtgaactttcccggaaaagaaaaactaaatccaagcagaattctccttctgcagtttcatcatcaaaggagattgaagagaaggaagattctgatccaaagagatgcaaaaaatcagaagaaaatggagacaaaactaaatcaattgatccttacaaagattacattcatgttagagctcgacgaggccaagccaccgatagtcacagtctcgccgaacgagttcgaagagagaaaataagcgaaagaatgaagctgcttcaagatcttgtccctggatgcaacaaggttactggaaaagcactgatgttggatgaaattataaactatgtccaatcattgcaacgacaagttgagttcttgtcgatgaagttatcgtcagtgaacaccaggctggactttaacatggacgctctcttgtctaaggatatatttccttcaagcaacaatctaatgcatcatcaacaagtacttcaattagattcttcagcagaaacgttattgggtgatcatcacaacaaaaatttgcaattgaaccctgatatttcttctaataacgtaataaaccctttggaaacttctgaaactagaagcttcatttctcacttaccaacacttgctcatttcactgactctatttctcagtattcaacattttccgaagatgatttacatagcattattcatatgggttttgcgcaaaaccgtctccaagaattgaaccaaggttcatcaaaccaagtaccatcgcacatgaaagctgaactttga

SEQ ID NO: 475 - protein, 456 aa, Arabidopsis thaliana
MENELFMNAGVSHPPVMTSPSSSSAMLKWVSMETQPVDPSLSRNLFWEKSTEQSIFDSALSSLVSSPTPSNSNFSVGGVGGENVIMRELIGKLGNIGDIYGITASNGNSCYATPMSSPPPGSMMETKTTTPMAELSGDPGFAERAARFSCFGSRSFNSRTNSPFPINNEPPITTNEKMPRVSSSPVFKPLASHVPAGESSGELSRKRKTKSKQNSPSAVSSSKEIEEKEDSDPKRCKKSEENGDKTKSIDPYKDYIHVRARRGQATDSHSLAERVRREKISERMKLLQDLVPGCNKVTGKALMLDEIINYVQSLQRQVEFLSMKLSSVNTRLDFNMDALLSKDIFPSSNNLMHHQQVLQLDSSAETLLGDHHNKNLQLNPDISSNNVINPLETSETRSFISHLPTLAHFTDSISQYSTFSEDDLHSIIHMGFAQNRLQELNQGSSNQVPSHMKAEL

SEQ ID NO: 476 - DNA, 1497 bp, Arabidopsis thaliana
atggacaacgagctgtttatgaacacagagtttccaccaccgccggagatggcgacgcatttcgaacaccaacagtcttcttcatcggccatgatgcttaattgggctttaatggatccaaatccgcatcaagattcttcctttttatgggaaaagtcaacggaacaacaacaacaacaaagcatctttgactctgctttaagctcattagtctcatcaccgacgccgtcaaattccaacttctccggcggtggcggtgacggttttctcatcagagaactcatcggaaagcttggaaacatcggtaataataataacaactccggtgagatctacggaactccgatgtctcgctccgcctcatgttacgcaactccgatgagctctccaccgccaccgacgaattcgaattctcagatgatgatgaacagaacgacgccgttgacggaattctcagcagatccgggttttgcggagagagcagctagattctcttgttttggtagtcggagctttaacggaagaaccaatacaaatcttccgattaacaacggtaataacatggtcaacaactccgggaagctgacacgtgtctccagcacaccagctcttaaggctcttgtttcaccggaagtcacacccggcggcgaattttcccggaagagaaaatctgtgcctaaaggaaaatccaaagaaaaccccatttctacagcttctccatctcctagtttctcaaagacggcggaaaagaatggtggaaaaggaggaagtaaaagttcagaagaaaaaggaggaaaaaggagaagagaagaagaagatgatgaagaagaagaaggagaaggtgaagggaacaaaagcaataacacaaaaccacctgagcctcctaaagattacattcatgttcgagctcgacgaggccaagcaaccgatagtcacagcctcgccgaacgagttcggagggagaaaattggtgaaaggatgaagcttcttcaagatcttgtgcctggatgcaataaggttactggaaaagcactgatgcttgatgaaattataaactacgtacaatcattgcaaagacaagttgagttcttgtcaatgaagttatcatcagtgaacgacaccaggctggattttaacgtggacgctcttgtgtcaaaggatgttatgattccatcaagtaacaaccgattgcatgaagaaggactccaatcaaagtcttcaagtcatcatcatcaacaacaacttaatatttataacaataattcacaattacttcccaatatttcttccaataacatgatgctccagtctcctatgaactctttggaaacctctaccttagccagaagcttcactcacttaccaacacttacccaatttactgactcaatttctcagtatcaaatgtttagcgaagaagatttacaaagcatagtaggaatgggagtggcagaaaaccccaacaatgaatctcaacacatgaaaattgagctttga

SEQ ID NO: 477 - protein, 498 aa, Arabidopsis thaliana
MDNELFMNTEFPPPPEMATHFEHQQSSSSAMMLNWALMDPNPHQDSSFLWEKSTEQQQQQSIFDSALSSLVSSPTPSNSNFSGGGGDGFLIRELIGKLGNIGNNNNNSGEIYGTPMSRSASCYATPMSSPPPPTNSNSQMMMNRTTPLTEFSADPGFAERAARFSCFGSRSFNGRTNTNLPINNGNNMVNNSGKLTRVSSTPALKALVSPEVTPGGEFSRKRKSVPKGKSKENPISTASPSPSFSKTAEKNGGKGGSKSSEEKGGKRRREEEDDEEEEGEGEGNKSNNTKPPEPPKDYIHVRARRGQATDSHSLAERVRREKIGERMKLLQDLVPGCNKVTGKALMLDEIINYVQSLQRQVEFLSMKLSSVNDTRLDFNVDALVSKDVMIPSSNNRLHEEGLQSKSSSHHHQQQLNIYNNNSQLLPNISSNNMMLQSPMNSLETSTLARSFTHLPTLTQFTDSISQYQMFSEEDLQSIVGMGVAENPNNESQHMKIEL

SEQ ID NO: 478 - DNA, 1260 bp, Aquilegia sp.
atgctacactgcgcagcagataccatgactgttttagaaagacaacaagctcggcaaaaatggcaacaagtcccactactacaacaacaacaacaacaacagcagcatcaacaaagctattttagtgatacccatttcaatttattaccaaattcttcttcttcttcacaacaatttcatattatgatgaatgatgattcagtgattagagattttgtgaatcgttcaattaaattggacccaagtttggataataatgggtggcaggattttgggaaatacccagtttctggaaatggatttggtgttaatggagttgatttggttgattattcactttctagaacatctagttgtccaccggcagatgtggtggtggaagcaaaaggtggtgaagttgtggtggcggagaagttaggtggtaaagttgggaaagaaagctttaagaagagaaaagcacagaactcaaaggttgtagcagaggaagttattagagacaagagaatgaaaggggattcagaagaagagtctaaagttactgaagtgaataacagcaacagcagtactagcaataataacaacaaagaaacttctggggattcagtgaaagagaattcaaaggcatctggagcacaaaaacaagattacattcatgttcgagcacgtcgtgggcaagctaccgacagtcatagcttagctgaaagagtaagaagagaaaagattagtgagagaatgaaatatcttcaagatttagttccaggatgtaacaagatcactggcaaggctggaatgttagatgaaatcattaattatgttcaatcactacaaagacaagtcgagttcttgtcaatgaagcttgctgctgttaatcctagacttgactttaacatcgagaatttattcgcaaaagagatgttttcggctaacactgctggttttccaatcgggacatcatcagaaatggccaatccctcagcctaccttcctcttaattcattacaacaaatgatctcaaattgtggtttggatatggggatgaattcttctgatatctcacttcaaagaacacgaagtgcaccagtgtcagatgcattcctagatacctcttgcttcactcaagcccaaccctcttcttctgcctgggagactgatttgcagagcctttacaatgtggaattcaatcaaactagaccagttacatttccacctcaatcatttacaggcattttggaagctaacaacctcaagatggagatgtga

SEQ ID NO: 479 - protein, 419 aa, Aquilegia sp.
MLHCAADTMTVLERQQARQKWQQVPLLQQQQQQQQHQQSYFSDTHFNLLPNSSSSSQQFHIMMNDDSVIRDFVNRSIKLDPSLDNNGWQDFGKYPVSGNGFGVNGVDLVDYSLSRTSSCPPADVVVEAKGGEVVVAEKLGGKVGKESFKKRKAQNSKVVAEEVIRDKRMKGDSEEESKVTEVNNSNSSTSNNNNKETSGDSVKENSKASGAQKQDYIHVRARRGQATDSHSLAERVRREKISERMKYLQDLVPGCNKITGKAGMLDEIINYVQSLQRQVEFLSMKLAAVNPRLDFNIENLFAKEMFSANTAGFPIGTSSEMANPSAYLPLNSLQQMISNCGLDMGMNSSDISLQRTRSAPVSDAFLDTSCFTQAQPSSSAWETDLQSLYNVEFNQTRPVTFPPQSFTGILEANNLKMEM

SEQ ID NO: 480 - DNA, 894 bp, Aquilegia sp.
atgaaaagcgtcaatgatgtcaatgctcgaaaacgaaaaacagcacccaagtcgaaagccaaggacatcacttcactatcttcctcttccaaagatgccaaggaagccacagatgatgacaagtccaatgggaagagaagcaaatcaaatgataccaatggaaatgagaaggcttctgctaaggcaaagggggagccaaatagtggtgatggagctaagaaacaaaacaaggataccccaaagccttctccagagcctccaaaggattacattcatgttcgtgctagaagaggacaagcgacggatagccatagtcttgctgaaagggttcgaagagagaagataagtgaaagaatgaaattccttcaagatcttgtaccaggttgcaataaggtaaccggcaaagcacttatgcttgatgaaatcattaactatgtacaatccttacagagacaagtggagttcctctctatgaaattggctactgtgaatcccaggcttgattttaatatggaagcaacactcacaaaggatctacttcaatcgcgcgagtctttgtcacaagcaatgtaccaattaaattcatcagtatcggcttttcattatggtcaccaaggagaaggaactcctgtgcagcgtgaaatttcaaatagaactgaaacccaatcctcaatgaacccattaggtcccacactccaaagaaatacaagcttggagttgcctcccctggatggatttggagaagccgcagctcattttgcaaacttttgggaggatgacctccaaagtgttgttcaaatgggttttaatcaaaatcaaagccaggaatcgggattcgagacccacagtttccaaggctcattgtctacagctaatatgaaagttgagctctga

SEQ ID NO: 481 - protein, 297 aa, Aquilegia sp.
MKSVNDVNARKRKTAPKSKAKDITSLSSSSKDAKEATDDDKSNGKRSKSNDTNGNEKASAKAKGEPNSGDGAKKQNKDTPKPSPEPPKDYIHVRARRGQATDSHSLAERVRREKISERMKFLQDLVPGCNKVTGKALMLDEIINYVQSLQRQVEFLSMKLATVNPRLDFNMEATLTKDLLQSRESLSQAMYQLNSSVSAFHYGHQGEGTPVQREISNRTETQSSMNPLGPTLQRNTSLELPPLDGFGEAAAHFANFWEDDLQSVVQMGFNQNQSQESGFETHSFQGSLSTANMKVEL

SEQ ID NO: 482 - DNA, 795 bp, Capsicum annuum
atggatccgcaaacttcgttgattaaccacgccggaggttttcagtctccgcctccgccgccgtttaatttggctgatatctggcagtttccaggcaatgctggtggaaatgcgacggcctatagttttccggtgtcggcgtcggcggtggcggcggtggagcaggagcataatatgagtgatgtaccggagaatgatccgatgagaagagctaggaagcgaagggaggatgatgaatgtgctaaaggagtttctactagtggcaatggcttgactgaatctgatagtaaacggctgaaggctacgagattgaatgaaaattgcgaagctagatgtgatggggaagggaattcaaggaagtctgcagaacaacctgcaaagcctgctgaaccaccgaaagattacattcatgtgcgagcaagaaggggtcaagctacagatagtcacagtctagcagaaagagctaggagagaaaagataagtgagaggatgaaagtcctccaagatatagtccctggttgtaataaggttattggcaaagctcttgttcttgatgagataataaattatattcaatcattacaacaccaggttgagtttttatcaatgaagcttgaagcggttaattcaagagcggcaagcatagaaggatttcgatctaaagattttggacaccaaacatttgatccaaatgcaatggcattcggttcacaagctacaagggaatatgccaggggaacatcaccagaatggctgcatatgcagcttggtggaggatttgaacgaacaacataa

SEQ ID NO: 483 - protein, 264 aa, Capsicum annuum
MDPQTSLINHAGGFQSPPPPPFNLADIWQFPGNAGGNATAYSFPVSASAVAAVEQEHNMSDVPENDPMRRARKRREDDECAKGVSTSGNGLTESDSKRLKATRLNENCEARCDGEGNSRKSAEQPAKPAEPPKDYIHVRARRGQATDSHSLAERARREKISERMKVLQDIVPGCNKVIGKALVLDEIINYIQSLQHQVEFLSMKLEAVNSRAASIEGFRSKDFGHQTFDPNAMAFGSQATREYARGTSPEWLHMQLGGGFERTT

SEQ ID NO: 484 - DNA, 891 bp, Gossypium hirsutum
atggtcactggatctcaagtacatgttccagacagcaacaagaacacactccaggatggaaattcatgttctgataagagaaacagtaggctctcaaggtgttcatcgccagagaatggtgattccaaagatgaatcttcaatatctgaacagatcccaggtgtgggttcaagcatcaaagcccaaaacgatgccaatgccaggaaaaggaaatcaatgcccagagggaaagcaaaagaaaccccatctccagcagctgctgatgctaagattgctgaggagaacgatgaatccactgccaaacgaagcaagcaacaaaatgacagtgctaaagcagaaaataaagagaatcccaagccaccagagccgccaaaggactacatccatgtcagggccagaaggggtcaagcaactgatagccatagtcttgctgaaagagttcgaagagagaaaataagtgaaaggatgaagttccttcaggatcttgttccaggttgcaataaggtgactggcaaagcacttatgcttgatgaaattatcaactatgtgcagtcgttgcagcgtcaggtcgagttcttatctatgaagttggctactgtaaatccaaggatgaatgctaacacggaagccttactgtctaaggatatgtttcggtctcgtggatctttgccgcattctcattatccaatggattcttctgcgctggcattcggtttaaggtaccaaccccagcaagggcttcctatgaacaatggcatatccaatgacacacagattcaattctcaatgaatccagcaaatgctgccttgcataaaacacaaggattgcagctgcctcctgttgatggtatttctgatgctaaccctcagattggatcatttttggggtga

SEQ ID NO: 485 - protein, 296 aa, Gossypium hirsutum
MVTGSQVHVPDSNKNTLQDGNSCSDKRNSRLSRCSSPENGDSKDESSISEQIPGVGSSIKAQNDANARKRKSMPRGKAKETPSPAAADAKIAEENDESTAKRSKQQNDSAKAENKENPKPPEPPKDYIHVRARRGQATDSHSLAERVRREKISERMKFLQDLVPGCNKVTGKALMLDEIINYVQSLQRQVEFLSMKLATVNPRMNANTEALLSKDMFRSRGSLPHSHYPMDSSALAFGLRYQPQQGLPMNNGISNDTQIQFSMNPANAALHKTQGLQLPPVDGISDANPQIGSFLG

SEQ ID NO: 486 - DNA, 1587 bp, Glycine max
atgggtgacaaagaaaagtttgagttggatagaaacgaggatcctatgagttattctagtggaatgcactcggattggagatttgggggggatttgattggttcttcttcatgttcctctgcttcaatggtggactcatttggtccaaactactgggaaaaccccacctgttcccaaaacttgggattttgtgacattaatgtccacaacaatgggggttcttcaagcacagttgcaatcagaaaagatggttttggatttggaagagctggtcaggatcatcatgaaacacttgaaatgggttggaaccctgctaattctatattatcaaatggaccagggatgtttccccacactttgtctcagtttccaactgattctggattcattgagagagctgcaagattctcatgcttcagtggagggaattttagtgatatggtaaactcatatgggattgctcaatccatggggctgtatggagcaagagatgctattgcaggccatgggatgaaatcagtaactggagggcaatctcagggaggtgatatgaatgtagttgaagctacaaaggatgtgtctccatctgttgaacatcttgttgctgctaaaggaagccctctcaagagtgatagaagaagtgaaggccatgttatatcccaagatgaagggaagcaatctcttgttaggcccgctaatgagtctgatagagctgaatctagtgatgatggtggtggtcaggatgactccccaatgttggaaggtactagtggggaaccttctagcaaaggactaaacacaaagaaaaggaaaagaagtggacaggatggtgataatgataaagccaatggagctcaagaactacctagtgaaggtgcagaggacaactatgagaatcaacagaagggagaccaccaaccaacttcaacagccaaggcttctgggaagaatgccaaactggggtctcaagcttctgatccacccaaggaggaatacatacatgttagagctcgccggggtcaagcaacaaacagccatagccttgcagagagagtgaggagggaaaagataagtgagagaatgaagtttcttcaagatcttgtacctggatgcagcaaggtcactggcaaggcagtaatgctagatgaaatcatcaactatgtacagtcacttcaacgacaggttgagtttttgtctatgaaacttgcaacagtaaatccacggctggattttaatattgaaggacttcttgctaaagatattcttcaacaacggcctggtccttcatccgcactagggtttcctctagatatgtccatggcttttcctccattacatccacctcaacctgggctgattcatccagtaattcccaacatggcaaactcatctgatatccttcaaagaaccatccatccacagttagctcccttgaatggtggattaaaggaaccaaatcagctgcctgatgtatgggaggatgaacttcacaatgttgtacagatgagctttgcaacaactgctccccttactagccaagattttgatggtactgggccagcaagtcagatgaaagttgaactttga

SEQ ID NO: 487 - protein, 528 aa, Glycine max
MGDKEKFELDRNEDPMSYSSGMHSDWRFGGDLIGSSSCSSASMVDSFGPNYWENPTCSQNLGFCDINVHNNGGSSSTVAIRKDGFGFGRAGQDHHETLEMGWNPANSILSNGPGMFPHTLSQFPTDSGFIERAARFSCFSGGNFSDMVNSYGIAQSMGLYGARDAIAGHGMKSVTGGQSQGGDMNVVEATKDVSPSVEHLVAAKGSPLKSDRRSEGHVISQDEGKQSLVRPANESDRAESSDDGGGQDDSPMLEGTSGEPSSKGLNTKKRKRSGQDGDNDKANGAQELPSEGAEDNYENQQKGDHQPTSTAKASGKNAKLGSQASDPPKEEYIHVRARRGQATNSHSLAERVRREKISERMKFLQDLVPGCSKVTGKAVMLDEIINYVQSLQRQVEFLSMKLATVNPRLDFNIEGLLAKDILQQRPGPSSALGFPLDMSMAFPPLHPPQPGLIHPVIPNMANSSDILQRTIHPQLAPLNGGLKEPNQLPDVWEDELHNVVQMSFATTAPLTSQDFDGTGPASQMKVEL

SEQ ID NO: 488 - DNA, 1539 bp, Glycine max
atgagtgacaaagaaaagtttgaggtggatagaaacgaggatcatgtgagttattctagcggaatgcactcggattggagatttgggggttcaaatcttgcaaattcttcggtaggggatttgattggttcttcttcatgttcctctgcttcaatggtggactcacttagtccaaattactgggaaaaccccaccagctcccaaaagttgggattttgtgacattaataatgatcatcatggaacacttgaaatgggttggaatcatgctaattctatgttaccaaatggaccagtgatgtttccccacagtttatctcagtttccaactgattctggattcattgagagagctgcaaggttctcgtgcttcagtggagggaattttggtgacatggtgaactcatatgggattgctcaatccatggggctgtatggagcaagagatgctattgcaggccatgggttgaaatcagtaatagctggaggacaatctcaaggaggtgatatgaatgtagttgaggatgtgcctccatctgttgagcatcttgttgctgctaaaggaagccctctcaagagtgatagaagaagtgaaggtcatgttatattccaagatgaagggaagcaatctcttgttaggaatgctaatgagtctgatagagctgaatctagtgatgatggtggtggccaggatgattccccaatgttggaaggtactagtggggaaccttctagcaaaggactaaactcaaagaaaaggaaaagaagtggacgggatggtgataatgataaagccaatggagctcaagaactacctagtgaaggtgcaaaggggaactctgagaatcaacagaagggagaccaacaaccaatttcaacagccaacaaggcttgtgggaagaatgccaaattggggtctcaagcttctgatccacctaaggaggaatacatacacgttagggctcgccggggtcaagcaacaaatagccatagccttgcagagagagtgaggagggaaaagataagtgagaggatgaagtttcttcaagaccttgtacctggatgcagcaaggtcactggcaaggcagtaatgctagatgaaatcatcaactatgtacagtcacttcaacgacaggttgagtttttgtctatgaaacttgctacagtaaatccacggctggattttaatattgaaggacttcttgctaaagatattcttcaacaacggcctgatccttcaaccgcactagggtttcctctagatatgtccatggcttttcctccattacatccacctcaaccagggctgattcatccagtaattcccaacatgacaaactcatctgatattcttcaaagaaccatccatccacagttagctcccttgaatggtggattcaaggaaccaaatcagctgcctgatgtatgggaggatgagcttcacaatgttgtacagatgagctttgcaacaacggctcccccaactagccaagatgttgatggtactgggccagcaagtcagatgaaagttgaactttga

SEQ ID NO: 489 - protein, 512 aa, Glycine max
MSDKEKFEVDRNEDHVSYSSGMHSDWRFGGSNLANSSVGDLIGSSSCSSASMVDSLSPNYWENPTSSQKLGFCDINNDHHGTLEMGWNHANSMLPNGPVMFPHSLSQFPTDSGFIERAARFSCFSGGNFGDMVNSYGIAQSMGLYGARDAIAGHGLKSVIAGGQSQGGDMNVVEDVPPSVEHLVAAKGSPLKSDRRSEGHVIFQDEGKQSLVRNANESDRAESSDDGGGQDDSPMLEGTSGEPSSKGLNSKKRKRSGRDGDNDKANGAQELPSEGAKGNSENQQKGDQQPISTANKACGKNAKLGSQASDPPKEEYIHVRARRGQATNSHSLAERVRREKISERMKFLQDLVPGCSKVTGKAVMLDEIINYVQSLQRQVEFLSMKLATVNPRLDFNIEGLLAKDILQQRPDPSTALGFPLDMSMAFPPLHPPQPGLIHPVIPNMTNSSDILQRTIHPQLAPLNGGFKEPNQLPDVWEDELHNVVQMSFATTAPPTSQDVDGTGPASQMKVEL

SEQ ID NO: 490 - DNA, 1575 bp, Glycine max
atggaaaaccagttctttctgaattctggggtgtcacaaacacagcaccaccaccctcttcacttagaatcttcaccaccatccaatccttcttcagtgccctcttggcaatcactctcaccaccaaacatggggattcaaccaacagttatgaattatcaaggccttcaccactttgattcctcagcactgagttcaatggtctcatcaccagcagcatcatccaaccccaacaacaacatgtccaatgagaatttcatcatccgggaattgatggggaaattgggagctattgggaactctgatgagatcccacaacactctcctcaccctttggttgtggcatcttcttacatgaatactaaaggcaataacagcaccaacacttcatgctacagcacccctttgagctcccctccaaaggtgaacattgtcaacagcttggtgaatttgaggttggcaaatttgggagggggaaagtcaacaacaacggttttgaattccagtgtggctgaattctcagctgatcctggctttgctgagagggctgcaaagttttcttgctttggcagcaggagtttcaatgataggagtgtccaattgagggtgaacaatgctgaattggctcaaagatctgcaccagcaatggaacatggtgggaagttacctagagtctcaagcagtccattgctcaaaacacttggatctcaaatggaggaatctacaatttctgagcaaaccccaaatggggaaattggggtgaaaacttcccaagatattatgaattccaggaaaagaaaagcttcttccaaaggaaaagccaaagaaacttcaaacactactaatcctaccaaggttgaggaagagtccaaagcagaggaagagaaacagagcaaaagtaactcaaaacctcctgagccaccaaaagattacattcacgtgagagcaagaagaggccaagccactgacagccatagtctagcagaacgtgtacggagggagaaaatcagtgagaggatgaagctgctccaagatcttgtaccaggttgcaataaggtcactggcaaagcacttatgctagatgaaattataaattatgttcagtcattgcaacgtcaagttgagtttctgtctatgaaattggcttctgttaacacaaggatggatcttagtattgagagtcttgttacaaaagatgtattccaatcaaacaattctttggcaacacacccaaatgcaataatattcccattaggttcctcagcacaagccttttatgggcaccagcctcagcaaaacaacccagttttccataataacatacctaacagaacggtgacccactgctcagtggacccattagatacttctttgtgccaaaatcttgccatgcagttatctccgctagatgtgtttaatgaaggtggctctcagtttccattagcattcttagaggatgatctccacaccattgttcagatggggtttggccaagctgctaacaggaaaacaccaatacaatcctcgagtttcaacggttcaaataatgtaccacagatgaaagtagagctctga

SEQ ID NO: 491 - protein, 524 aa, Glycine max
MENQFFLNSGVSQTQHHHPLHLESSPPSNPSSVPSWQSLSPPNMGIQPTVMNYQGLHHFDSSALSSMVSSPAASSNPNNNMSNENFIIRELMGKLGAIGNSDEIPQHSPHPLVVASSYMNTKGNNSTNTSCYSTPLSSPPKVNIVNSLVNLRLANLGGGKSTTTVLNSSVAEFSADPGFAERAAKFSCFGSRSFNDRSVQLRVNNAELAQRSAPAMEHGGKLPRVSSSPLLKTLGSQMEESTISEQTPNGEIGVKTSQDIMNSRKRKASSKGKAKETSNTTNPTKVEEESKAEEEKQSKSNSKPPEPPKDYIHVRARRGQATDSHSLAERVRREKISERMKLLQDLVPGCNKVTGKALMLDEIINYVQSLQRQVEFLSMKLASVNTRMDLSIESLVTKDVFQSNNSLATHPNAIIFPLGSSAQAFYGHQPQQNNPVFHNNIPNRTVTHCSVDPLDTSLCQNLAMQLSPLDVFNEGGSQFPLAFLEDDLHTIVQMGFGQAANRKTPIQSSSFNGSNNVPQMKVEL

SEQ ID NO: 492 - DNA, 1761 bp, Glycine max
atggaaaaccaattctttctcaatgctggtgtgccccctcagctgcattttgagccttctccacaccaccatcatcaccatctttgtccaccaccctcttggcaatcatcactgtcttctgccatggatgttcaagtcactgttttgaattgttcaactgagcagaacccggattgcttctacaacaacacccccacatgggacaagtcaacggatcatcatggtcttcagtttgattcagctctgagctcaatggtgtcctctcctgcagcctccaattccaacatgtcaagtgagaattttgtcatcagggaattgattggaaaattgggaaacattggtgctggctctgatgagattgagatctcacctcattctcagcctttggttggtgcatcttcctacatcaattgcaataacaacagcaccaacacatcatgttatagtacccctttgagttcttctccaaaggtgaacatgaacaagatccccacaatggtgaagcacttggtgaaagagggcatgcccctaagtttggggacatcaacgtccttgaattccaccgtggcggaattctcagctgatcctggctttgctgagagggctgcaaagctttcttgctttggaagtaggagtttcaatggcaggaccacccaattgtgcctcaacattgctgaattggctcagagatcttctccattggtggaaaatgggaagaagcagctccctagagtctcaagtagtccatcactcaaagtgcttggatctcaaatgggtactcaggagaacaagaattctccattgcaagacctaatggaagtggccaattctcaagaggagtccgcaatctctgaacaaacaccaaatggagacactggggagaaaccttccccttatgtgaattctaggaaaagaaaaggtccatccaaaggaaaagccaaagaaacttcaacctctaccaacccccctatggctgctgaagctagcgatgactcgaatgcaaagcgcagcaagcctaacgaaggtgaggggaatgaaaatggccaagtgaaggcagaggaagagtccaaaggaggtaataatagtaatgcaaatgatgagaaacagaacaagagtaactcaaaacctcctgagcctccaaaggattacattcatgttagagcaagaagaggtcaagccactgatagtcatagtcttgcagaaagagttcggagggagaaaatcagtgaaagaatgaagcttctccaagatcttgtcccaggttgcaacaaggtcacgggtaaagcactaatgcttgatgaaattataaactatgttcagtcattgcagcgccaagttgagtttctgtctatgaagttggcttctgttaacaccaggctggattttagtattgagagtctaatctcaaaagatatatttcaatcaaataattctttggcacagccaatattcccaatagattcctcggcgccacccttttatgggcaacaaactcagccaaacccagcaatccacaataacattcctaatggaactatgacccacaactcagtggacccattagatactggtatgtgccaaaaccttggcatgcatttaccacacctaaatggttttaatgaaggtggctttcagtatccaataacattctctgaagatgacctccacaccattgttcagatgggatttggccaaactgcaaataggaaaacaccaatacaatctcagagtttcaatggctcaaatcaagaacccctatga

SEQ ID NO: 493 - protein, 586 aa, Glycine max
MENQFFLNAGVPPQLHFEPSPHHHHHHLCPPPSWQSSLSSAMDVQVTVLNCSTEQNPDCFYNNTPTWDKSTDHHGLQFDSALSSMVSSPAASNSNMSSENFVIRELIGKLGNIGAGSDEIEISPHSQPLVGASSYINCNNNSTNTSCYSTPLSSSPKVNMNKIPTMVKHLVKEGMPLSLGTSTSLNSTVAEFSADPGFAERAAKLSCFGSRSFNGRTTQLCLNIAELAQRSSPLVENGKKQLPRVSSSPSLKVLGSQMGTQENKNSPLQDLMEVANSQEESAISEQTPNGDTGEKPSPYVNSRKRKGPSKGKAKETSTSTNPPMAAEASDDSNAKRSKPNEGEGNENGQVKAEEESKGGNNSNANDEKQNKSNSKPPEPPKDYIHVRARRGQATDSHSLAERVRREKISERMKLLQDLVPGCNKVTGKALMLDEIINYVQSLQRQVEFLSMKLASVNTRLDFSIESLISKDIFQSNNSLAQPIFPIDSSAPPFYGQQTQPNPAIHNNIPNGTMTHNSVDPLDTGMCQNLGMHLPHLNGFNEGGFQYPITFSEDDLHTIVQMGFGQTANRKTPIQSQSFNGSNQEPL

SEQ ID NO: 494 - DNA, 1743 bp, Glycine max
atggaaaaccaattctttctcaatgctggtgtgccccctcagctgcattttgagccttcaccacacggtcaccaaccttgtccaccaccctcttggcaatcatcactgtcttctgccatggatgttcaagtcaccgttttgaattgttcaactgagcagacccaggattgcttctacaacaccaccccaacatgggacaagtcaacggatcatggccttcagtttgattcagctctgagttcaatggtgtcctctcctgcagcctccaattccaacatatcaagtgagaattttgtcatcagggaattgataggaaaattgggaaacattggtggtggtggtggttcagatgagatctcacctcattctcagcctttggttggtgcatctttctacatcaattgcaataataatagcaccaacacttcatgttatagcacccctttgagttctcctccaaaggtgaacacgatcaagatccccacaatggtgaaccacttggtgaaggagggcatgcccccaagtttggagacaccaatgtccttgaattccactgtggctaaattctcagctgatcctggctttgctgagagggctgcaaagttttcatgctttggaagtcggagtttgaatggcaggaccacccaattgggactcaacaatgctgaattggctcagagatcttcattggtggaaaatgggaagcggctccctagagtctcaagtagtccatcactcaaagtgcttgaatctcaaatgggtactcaggagaacaaaaattctccattgcaagacctaatggaattggccaattctcaagaggaatccacaatctctgaacagaccccaaatggggacactggggtgaagccttccccttatgtgaattctaggaaaagaaaaggtccatccaaaggaaaagccaaagaaacttcagcctctattaacccccctatggctgctgaagctagtgaagactggaatgcgaaacgcagcaagcctaatgccggtgaggggaatgaaaatggccaagttaaggcagaggaagagtccaaagggggtaatagtaatgcaaatgatgagaaacagaacaagagtaactcaaaacctcctgaacctccaaaggattacattcatgttagagcaagaagaggtcaagccactgatagtcatagtcttgcagaaagagttcggagggagaaaatcagtgaaagaatgaagcttctccaagatcttgtcccaggttgcaataaggtcacgggtaaagcactaatgcttgatgaaattataaactatgttcagtcattgcagcgccaagttgagtttctgtctatgaagttggcttctgttaacaccaggctggattttagtattgagagtctaatctcaaaagatatatttcaatcaaataattctttggcacacccaatattcctgatagattcctcagcaccacccttttatgggcaacaccctcagccaaacccagcagtccacaataacattcctaatggaactatgacccacaactcagtggacccattagatactggtttgtgccaaaaccttggcatgcatttaccacacctaaatgattttaatgaaggtggttctcagtatgcaaaaccattctctgaagatgacctccacaccattattcagatgggatttggccaaaatgcaaataggataacaccaatacaatctcagagtttcaacggctcaaatcaagtacccctatga

SEQ ID NO: 495 - protein, 580 aa, Glycine max
MENQFFLNAGVPPQLHFEPSPHGHQPCPPPSWQSSLSSAMDVQVTVLNCSTEQTQDCFYNTTPTWDKSTDHGLQFDSALSSMVSSPAASNSNISSENFVIRELIGKLGNIGGGGGSDEISPHSQPLVGASFYINCNNNSTNTSCYSTPLSSPPKVNTIKIPTMVNHLVKEGMPPSLETPMSLNSTVAKFSADPGFAERAAKFSCFGSRSLNGRTTQLGLNNAELAQRSSLVENGKRLPRVSSSPSLKVLESQMGTQENKNSPLQDLMELANSQEESTISEQTPNGDTGVKPSPYVNSRKRKGPSKGKAKETSASINPPMAAEASEDWNAKRSKPNAGEGNENGQVKAEEESKGGNSNANDEKQNKSNSKPPEPPKDYIHVRARRGQATDSHSLAERVRREKISERMKLLQDLVPGCNKVTGKALMLDEIINYVQSLQRQVEFLSMKLASVNTRLDFSIESLISKDIFQSNNSLAHPIFLIDSSAPPFYGQHPQPNPAVHNNIPNGTMTHNSVDPLDTGLCQNLGMHLPHLNDFNEGGSQYAKPFSEDDLHTIIQMGFGQNANRITPIQSQSFNGSNQVPL

SEQ ID NO: 496 - DNA, 1365 bp, Glycine max
atgaatagtaatggcaataacagcacctacacttcatgctacagcacccctttgagctcccctccaaaggtgaacattgtccacagtttggtgaatgagaggttggcaaatttgggaggagggaagtcaacaatggctttgaattccagtgtggctgaattctcagctgatcctggctttgctgagagggctgcaaagttttcttgctttggcagcaggagtttcaatgataggagtgtccaattgggggtgaacaatgctgaattggctcaaagatctgcaccagcaatggaacatggtgggaagttgcctagagtctcaagtagtccattgctcaaaacacttggatctcaaatgggtgcccaagagaacaagaattcagcaattcatcaggagcaggagaaaatggaaggggccaattctcaagaggaatctacaatttctgagcaagccccaaatggggaaattggggtgaaaacttcacaggatatgatgaattccaggaaaagaaaagcttcttcgaaaggcaaagccaaagaaacttcaaactcttttaatcctaccaagggtgttgaaggtagtgaggattcaaattcaaagcgcagcaagccaaatgagggcgacggaaatgaaaatggccaagtgaaggttgaggaagagtccaaagcagaggaagagaaacagaacaaaagtaactcaaaacctcccgagccaccaaaagattacattcatgtgagagcaagaagaggccaagccactgacagccatagtcttgcagaacgtgtacggagggagaaaatcagtgagaggatgaagctgctccaagatcttgtaccaggttgcaataaggtcactggcaaggcacttatgctagatgaaattataaattatgttcagtcattgcagcgtcaagttgagttcctgtctatgaagttggcttctgttaacacaaggatggatcttagtattgagaatcttatttcaaaagatgtattccagtcaaacaattctttggcaacactcccaaatgcagtattcccattagattcctcagcacaaaccttttatgggcaccagcctcagcaaaacaacccagttgcccataataacatacctaacagatcggtgacccactgctcagtggacccattagatacttctttgtgccaaaaccttgccatgcagttaccacccctaaatgtgtttaatgatggtggctctcagtttccattagcattcttagaggacgatctccacaccattgttcagatggggtttggccaagcagctaacagaaaaacaccaatacaatccccgagtttcaacggttcaaataatgtaccacagatgaaagttgagctctga

SEQ ID NO: 497 - protein, 454 aa, Glycine max
MNSNGNNSTYTSCYSTPLSSPPKVNIVHSLVNERLANLGGGKSTMALNSSVAEFSADPGFAERAAKFSCFGSRSFNDRSVQLGVNNAELAQRSAPAMEHGGKLPRVSSSPLLKTLGSQMGAQENKNSAIHQEQEKMEGANSQEESTISEQAPNGEIGVKTSQDMMNSRKRKASSKGKAKETSNSFNPTKGVEGSEDSNSKRSKPNEGDGNENGQVKVEEESKAEEEKQNKSNSKPPEPPKDYIHVRARRGQATDSHSLAERVRREKISERMKLLQDLVPGCNKVTGKALMLDEIINYVQSLQRQVEFLSMKLASVNTRMDLSIENLISKDVFQSNNSLATLPNAVFPLDSSAQTFYGHQPQQNNPVAHNNIPNRSVTHCSVDPLDTSLCQNLAMQLPPLNVFNDGGSQFPLAFLEDDLHTIVQMGFGQAANRKTPIQSPSFNGSNNVPQMKVEL

SEQ ID NO: 498 - DNA, 963 bp, Gossypium raimondii
atggtcactggatctcaagtacatgttccagacagcaacaagaacacactccaggatggaaattcatgttctgataagagaaacagtaggctctcaaggtgttcatcgccagagaatggtgattccaaggatgaatcttcaatatctgaacagatcccaggtgtgggttcaagcatcaaagcccaaaacgatgccaatgccaggaaaaggaaatcaatgcccagagggaaagcaaaagaaaccccatctccagcagctgctgaggctaagattgctgaggagaacaataaatccactgccaaacgaagcaagcaacaaaatgacagtgctaaagcagaaaataaagagaatcccaagccaccagagccgccaaaggactacatccatgtcagggccagaaggggtcaagcaactgatagccatagtcttgctgaaagagttcgaagagagaaaataagtgaaaggatgaagttccttcaggatcttgttccaggttgcaataaggtgactggcaaagcacttatgcttgatgaaattatcaactatgtgcagtcgttgcagcgtcaggtcgagttcttatctatgaagttggctaccgtaaatccaaggatgaatgctaacacggaagccttactgtctaaggatatgtttcggtctcggggatctttgccccattctcattatccaatggattcttctgcgctggcatttggtttaaggtaccacccccagcaagggcttcctatgaccaatggcatatccaatgccccccagattaaattttcaatgaatccagcaaatgctcccttgcataaaacccaaagattgcagctcccccctgttgagggtatttttgaggctacccctcagattggatcattttgggaggatgccctccaaaccattgttcaaatgggatttggccagaatcacccccaaagctgtcaaagtaagcatagttga

SEQ ID NO: 499 - protein, 320 aa, Gossypium raimondii
MVTGSQVHVPDSNKNTLQDGNSCSDKRNSRLSRCSSPENGDSKDESSISEQIPGVGSSIKAQNDANARKRKSMPRGKAKETPSPAAAEAKIAEENNKSTAKRSKQQNDSAKAENKENPKPPEPPKDYIHVRARRGQATDSHSLAERVRREKISERMKFLQDLVPGCNKVTGKALMLDEIINYVQSLQRQVEFLSMKLATVNPRMNANTEALLSKDMFRSRGSLPHSHYPMDSSALAFGLRYHPQQGLPMTNGISNAPQIKFSMNPANAPLHKTQRLQLPPVEGIFEATPQIGSFWEDALQTIVQMGFGQNHPQSCQSKHS

SEQ ID NO: 500 - DNA, 931 bp, Helianthus tuberosus
  misc_feature (813)..(813): n is a, c, g, or t
atgaatccgggattcatgcaacaacaagaagcttttttcagtgtgaatgatcatcatcaccttcaagatatgtttactttaggtatggttgataaagattcaggcttgaacatcgtgaaaccggacccggagatggaggaatgctgggtcgggtttgacgcgggtgcgtatggtggtcagttgggttatggatatgtgaaccataacacagttttgaaggtgtcaaatatacatgggaatgcaagttcagttttagtgtcacctaagaagaggaaagctgataagggtcaaaccctacaggtagtttctgaaaaagaaaagaaaataaaaggatgctgcgacggagattctaaactcacacgccaaaacagtaacggtaacaataacaataacaacaaagaagcttttacaaaagcttcatccaaagacaaacagaaggtttccgaggaccaaaagaaagattatattcatgttagagcacgccgcggtcaagccacagacagccatagtctagcagaaagagtaaggagggagaaaatcagtgaaagaatgaagtacctgcaggatttggttccaggctgcaacaagatcagagggaaagctggaatgcttgatgaaatcattaactatgttcagtcccttcaaaaacaagtggagtttctgtccatgaagcttgcaagtgttaatccagagctagatttcaacatggataacgcattcacgaaagagatgtttgattcctcgacaagcgaacatccagcactcgcgtgctcttcagcgaattctgcatattttgattagttgaactcattnggatcagtggtttcgtatcccggattagacatgggaattaactcagcagaaatggaattaagaagaagtattagtgctcccactttcattcctgaaacatttatggattcatcttttt

SEQ ID NO: 501 - protein, 310 aa, Helianthus tuberosus
  misc_feature (270)..(270): Xaa can be any naturally occurring amino acid
  misc_feature (310)..(310): Xaa can be any naturally occurring amino acid
MNPGFMQQQEAFFSVNDHHHLQDMFTLGMVDKDSGLNIVKPDPEMEECWVGFDAGAYGGQLGYGYVNHNTVLKVSNIHGNASSVLVSPKKRKADKGQTLQVVSEKEKKIKGCCDGDSKLTRQNSNGNNNNNNKEAFTKASSKDKQKVSEDQKKDYIHVRARRGQATDSHSLAERVRREKISERMKYLQDLVPGCNKIRGKAGMLDEIINYVQSLQKQVEFLSMKLASVNPELDFNMDNAFTKEMFDSSTSEHPALACSSANSAYFDLNSXGSVVSYPGLDMGINSAEMELRRSISAPTFIPETFMDSSFX

SEQ ID NO: 502 - DNA, 1404 bp, Medicago truncatula
atgagtgaaagtgaaaattttgaggtagatagaaaagagggtactttagattggaggtttgttagtggcaaccttgcaaattcatctgtaggtttggtttccatggaaaattctatgatgggtacttcttcatgtcctaattcaatggtggattcatatggtcctaacttcttggaccttcttactaactctgaaaacttgggtggtttttgtgatgttaatggtcagagtaatgaggtgagaaaagatgggtttggttttgcaagagttggttgtgatgatagaacagttggaatgggttgggaccttggtagtagttctatgataaagagggatggtgttttaccaaatggggctgagatatttcctcaaagtttgtctcagttttcaactgattctggatttgttgatgctgcaaggatgtcttgttttagtgccgggagtttcgtagatatgatgaactcatgtgggattcctcaatctatggctctacctctacacgtgtctcggtctgttgagcatcttggtagtgatggaagtccaatccagaatgatcgaagaagtgactgtcctgtgatgtctcaagatgaagggaaacaagttcttggtaggtcttgtaatgaagctgatggagatgaatcaagtggtgatgatggttcccaaatgttggattgtgcaagtggagaaccttctattaaaggtctaaatccaaagaaaaggaaaagaaatggacaggacggtgatagtgataaagccaccggaactcttgagttaccaagtgaaaccgcaaaggacaactgtgagagcagaaaaaagggaaagcagcaaacaagttcaacagccaaggcttctgggaagaatgccaaacaggggtctcaagcttctgatccgcctaatgagggatacgtacatgttagggctcgccgtggtcaagcaacaaatagccatagccttgcagagagagtgaggagagaaaagatcagtgaaagaatgaagtttcttcaagatcttgtacctggatgcaacaaggtcactggcaaggcagtgatgctagatgaaatcattaattatgtacagtctcttcagcaacaagttgagtttttatcaatgaaacttgcaacagtaaatccacatgtggattttaatatggaacggctgcttcctaaagatattcttcaacatcaaccgggtccatcatctgctctggggtttctcagagaaatgccaatggcttttcctccattatcacattcatatcaaccaggactgattcattcaactctacctaacatggcaaatttatcagatatgcttaggcagactgttcaaccacagttggaacctttggctggagggtttaaagagccaaatcaggttaatccattgcaagcaaccaaggactga

SEQ ID NO: 503 - protein, 467 aa, Medicago truncatula
MSESENFEVDRKEGTLDWRFVSGNLANSSVGLVSMENSMMGTSSCPNSMVDSYGPNFLDLLTNSENLGGFCDVNGQSNEVRKDGFGFARVGCDDRTVGMGWDLGSSSMIKRDGVLPNGAEIFPQSLSQFSTDSGFVDAARMSCFSAGSFVDMMNSCGIPQSMALPLHVSRSVEHLGSDGSPIQNDRRSDCPVMSQDEGKQVLGRSCNEADGDESSGDDGSQMLDCASGEPSIKGLNPKKRKRNGQDGDSDKATGTLELPSETAKDNCESRKKGKQQTSSTAKASGKNAKQGSQASDPPNEGYVHVRARRGQATNSHSLAERVRREKISERMKFLQDLVPGCNKVTGKAVMLDEIINYVQSLQQQVEFLSMKLATVNPHVDFNMERLLPKDILQHQPGPSSALGFLREMPMAFPPLSHSYQPGLIHSTLPNMANLSDMLRQTVQPQLEPLAGGFKEPNQVNPLQATKD

SEQ ID NO: 504 - DNA, 1497 bp, Medicago truncatula
atggaaaaccaattctttttaaatgctggatttgaaccttaccaaacccaagattgttttttcaacccaaattgggacaagtcaacggaccaaaaccttaactatgattcaacacttagttcaattgtctcatccccagcagctacatcatcaccatcaaatcccaacatgtccaatgaaaattttgtcatgagagaattaataggaaaattgggaacttttggtgagatctcacaacattcttctaaccctttggttctaccaatgatgtctagagtggcagaattttcacctgatcctggttttgttcaaagggctgcaaaattttcttgctttggtagcaagagtttcaatgaaagaggtaaccaaatggtgatgaacaatgttgaattagctcaaagatctcataatttaatggaaaatggaatgaagttatcaagagtttcaagtagtccatcactcaaaacatttggatctcaaatggttaatcatgagaacaagaattcttcattgcaacaagaaaatgagaaaatggaagtggctaattctcaagaagaatctacaatatctgagcaaaatacaccaaatggtgaaattggtgtcaaagcttcacctgatatgaattcaaggaaaagaaaagcttcttcttccaaaggaaaagcaccaaactctaccaatcctacgaagggtgttgaaggtagtggtgaagacttcaatgcaaagaaaattaaggcaaatgagggtgagagaaatgaaaatggtgtcaggaatatggaggaagagatcaaagaaggtacaccaaatgcaggggaagaaaaacagaacaagagtgactcaaaacctcctgaacctcaaaaagattacattcatgtcagagcaagaagaggtcaagctactgacagtcacagtcttgcagaacgagtaaggagggagaaaataagtgagaggatgaaacttctccaagatcttgtaccaggttgcaataaggttactggaaaagcacttatgcttgatgaaattataaattatgttcagtcattgcagcgtcaagttgagtttttgtctatgaaattgtcttcagtgaacacaaagatggatttaagtattgaaagtcttgttgtatcaaaagatatatttcaatcaaataattctttgcaaaactcaatattccaattagattcctcggtaccatccttttatgggcaacaaccccagcaaaaccaagctattcataataacatccctaatacaaatgggtcccactgctcagtggaaccattggattcttctttgtgccataatattggcatgcatttacctttcctaaatggatttaatgaaggtggctctcagcagtatccattaacattctctgaggaggacttaaacaccgttgttcagatgggatttggccaaacttcaaacaggaatacaccaatacactccccaagtttcaacggttcaaatcaatcaacacaaatgaaaattgagctctaa

SEQ ID NO: 505 - protein, 498 aa, Medicago truncatula
MENQFFLNAGFEPYQTQDCFFNPNWDKSTDQNLNYDSTLSSIVSSPAATSSPSNPNMSNENFVMRELIGKLGTFGEISQHSSNPLVLPMMSRVAEFSPDPGFVQRAAKFSCFGSKSFNERGNQMVMNNVELAQRSHNLMENGMKLSRVSSSPSLKTFGSQMVNHENKNSSLQQENEKMEVANSQEESTISEQNTPNGEIGVKASPDMNSRKRKASSSKGKAPNSTNPTKGVEGSGEDFNAKKIKANEGERNENGVRNMEEEIKEGTPNAGEEKQNKSDSKPPEPQKDYIHVRARRGQATDSHSLAERVRREKISERMKLLQDLVPGCNKVTGKALMLDEIINYVQSLQRQVEFLSMKLSSVNTKMDLSIESLVVSKDIFQSNNSLQNSIFQLDSSVPSFYGQQPQQNQAIHNNIPNTNGSHCSVEPLDSSLCHNIGMHLPFLNGFNEGGSQQYPLTFSEEDLNTVVQMGFGQTSNRNTPIHSPSFNGSNQSTQMKIEL

SEQ ID NO: 506 - DNA, 792 bp, Oryza sativa
atgaaccccaccaccgccgccgccgccgaccaaccatccaagccctccgccgccgccgccgcccggaagcgcaagtcgtcggcgaagcccaaggcctcgtcctcatccttacccacggccacggcgacgacgaacgcgagcccgaagcggtccaaggtcgccgccggcgccggagacgacggcgacgccgacgccgacgcggcggaggagaagccggagccagccaaagactacatccatgtgagggcgaggcgggggcaagccaccgatagccatagcctcgccgagagggtgaggagggagaggataagcgagaggatgaagcttctgcagtcgctcgtgccaggctgcaacaagatcaccggcaaggctctcatgctggacgagatcatcaactatgtgcagtcgctgcagcgtcaggtcgagtttttgtccatgaagttggcgaccatgaatcctcagctggactttgacagccattacatgccttccaaagatatgagccatatgccagtacccgcatacccgtcaagcgatccgaccaccaccaccgcgttctcctacaccggctcacccgccactgctgatccattcaccgtctacaactgctgggagctcgacctccacaccgctatgcaaatgggagccaccaccggactcagccaagacggtccaatcgcaacgatggcaccctctccctcgccattgccgcaccatcctcctcttcacggcttctacggggggcagcagcagcaggggacgacagtaaaccacatgaaggccgagccataa

SEQ ID NO: 507 - protein, 263 aa, Oryza sativa
MNPTTAAAADQPSKPSAAAAARKRKSSAKPKASSSSLPTATATTNASPKRSKVAAGAGDDGDADADAAEEKPEPAKDYIHVRARRGQATDSHSLAERVRRERISERMKLLQSLVPGCNKITGKALMLDEIINYVQSLQRQVEFLSMKLATMNPQLDFDSHYMPSKDMSHMPVPAYPSSDPTTTTAFSYTGSPATADPFTVYNCWELDLHTAMQMGATTGLSQDGPIATMAPSPSPLPHHPPLHGFYGGQQQQGTTVNHMKAEP

SEQ ID NO: 508 - DNA, 1314 bp, Oryza sativa
atgaatgagaaggacgccactgatttggaggagaggagtgaggccagtgagcacggccaagctctgagtttccatggtggtgccatgttcttgcaagaggctcagattgcttctcctgcagctgcaaataatgcattgacctccatggcgaatcctttccctatccctcctgggttgtggaatccaccttcacacaacatgggtttaggcgaaaccagtttttcatccttgttggggatgctgtcggccggcgcgccgccaccgtttgtggctactcccgggtttgtagattccacggcggggtttccttgctacaatggaggcaatcttggagccatgatcaatcaccctttccctggtatccaccagcctttgggtgatttccaaaacggcgtcgagccatgtagggagattgaggatattgagattgaaggatccaagaatgtgtcacaaactggtgagaagcagcaaggggatggtgagacaacgcatgccgtcgattcctcctccaaggagctaagcatgccagggcgcaatggtggcgctggccatgatgaggggactagggtgtcttgttccaagaagaggaaaagatcaggacaggatggtggggtgaagcatgcagaaggtggtgagcaattagcaactgtcggttcagcgcagaagaatgaggatgatgaaaagggtgaaccaaagaggtcttctgtggcgtccgggaaatccagtgggaagcaaataaaggataatgcaggttcaccaaaggaagactatatacatgtaagagcacggcgcggtcaggctacaaacagccatagtcttgccgaaagggttaggagggagaagatcagtgaaaggatgaaatatcttcaggatcttgttcctggttgtagtaaagtaactggtaaggctgttatgctggatgagataattaactatgttcaatcattacagaggcaggttgagtttttgtcgatgaagctagcaagtgtcaatccaacactggacttcaacatagaacgcattttatctaaagatatttttcaatgtcgaggcactactgcatcatctgcctttggcttcttcccagacattgttcatccccgattacacccaccaaaatatacacaagttgggatgcccagcattgtgaaccccactgatgcatttggaagagtaatccatgctccattaggaactaacagtgcattcaaagaacctaaacatcagatgcccaacaatttgaatggagagttccaggacgtcattgagatgccttttactcatgaccatcatggatcaaatgatcaaccctga

SEQ ID NO: 509 - protein, 437 aa, Oryza sativa
MNEKDATDLEERSEASEHGQALSFHGGAMFLQEAQIASPAAANNALTSMANPFPIPPGLWNPPSHNMGLGETSFSSLLGMLSAGAPPPFVATPGFVDSTAGFPCYNGGNLGAMINHPFPGIHQPLGDFQNGVEPCREIEDIEIEGSKNVSQTGEKQQGDGETTHAVDSSSKELSMPGRNGGAGHDEGTRVSCSKKRKRSGQDGGVKHAEGGEQLATVGSAQKNEDDEKGEPKRSSVASGKSSGKQIKDNAGSPKEDYIHVRARRGQATNSHSLAERVRREKISERMKYLQDLVPGCSKVTGKAVMLDEIINYVQSLQRQVEFLSMKLASVNPTLDFNIERILSKDIFQCRGTTASSAFGFFPDIVHPRLHPPKYTQVGMPSIVNPTDAFGRVIHAPLGTNSAFKEPKHQMPNNLNGEFQDVIEMPFTHDHHGSNDQP

SEQ ID NO: 510 - DNA, 1218 bp, Oryza sativa
atggacggcggcagggtcgggggcgactacatttccagcctcctcagctcctccccccggctcgacttcggcgtgccggtgctggacgccatcgtggcgccgggaggcggcggcggcggcggcgactgcggcctcgacaagctctgcggcgacccggggttcgcggagcgcgccgcgcggctgtccagcttcaacaacggcggcggcggtgttgggcagcggtacggcggcgcgggggcggggctcttcgggatgcctcctccggctcccggcgacttcgccggaggtggctccagggaggcgtcctccgtgtccgaccccgcctcctcggcgatgaaggacgccgccgccaatgccaagaagaggaagtccacggcggcggcggccgccgccgccaagggcaaaggcaaggagcctccggttggggaagagaaggaatcagatggcaagaggtgcaagacgggcaatggcgagaaggagagctcggtgaagccgaaggcggagcaggccgggagcgacagctccgtcgaggacggcggcggtggcgggcagaagcaagggaaggggaagaatgccaagccggtggagccacccaaggactatgtccatgtccgggcgaggcgaggccaagccactgacagccacagcctcgctgagagggtcagaagagagaggatcagccagaggatgaaggttctccaggacctggttccaggatgcaacaaggtaattggcaaggcactcatgcttgatgagatcataaactacgtgcaatcgcttcaacggcaagttgagttcctgtccatgaagctagcaactgtgaatccacttgatttcagtaacctgcctactctgctgcagaaagatatgttccaagcatgcggcccttcagcgagctcggttttctcattagaaagctccaattctgcttttcggtttgccgaacaaggagatgttttccaacagtttgctcaaaacagcatggaaagccagtgcaccctgaatcagttggacctggctctatctcaggctacaaatgctgcacagtatgcttttcaagatggaacagccggcgcaaacttgcagcaaaggaacttctgggaggatgatctccaaagtgttttccatattgagaatggacagagccaggagaatggggtttcagcaccaaacttccatggtcagcagcaagcaggccacatgaaaatggagttctaa

SEQ ID NO: 511 - protein, 405 aa, Oryza sativa
MDGGRVGGDYISSLLSSSPRLDFGVPVLDAIVAPGGGGGGGDCGLDKLCGDPGFAERAARLSSFNNGGGGVGQRYGGAGAGLFGMPPPAPGDFAGGGSREASSVSDPASSAMKDAAANAKKRKSTAAAAAAAKGKGKEPPVGEEKESDGKRCKTGNGEKESSVKPKAEQAGSDSSVEDGGGGGQKQGKGKNAKPVEPPKDYVHVRARRGQATDSHSLAERVRRERISQRMKVLQDLVPGCNKVIGKALMLDEIINYVQSLQRQVEFLSMKLATVNPLDFSNLPTLLQKDMFQACGPSASSVFSLESSNSAFRFAEQGDVFQQFAQNSMESQCTLNQLDLALSQATNAAQYAFQDGTAGANLQQRNFWEDDLQSVFHIENGQSQENGVSAPNFHGQQQAGHMKMEF

SEQ ID NO: 512 - DNA, 1101 bp, Oryza sativa
atggacagcgactacgttgccggccttctcatgagcgccgccgccgcggggctcgacctcggtgtgctcgacggcggcggtggcgctttcttggagacgctgtgcggcgggcccggcttcgcggagcgggcggcgaggttgtgcggcggcggagctgggctcttcgggctgcctgcggtggggaacgccgagcgcggcggctgctcgagggaaggctcgtcggtgtccgaccctgcgtgggcgcacgccaccggcggcggcggcgacaatgccaggaagaggaaagctccggcgagcgccgccgccgggaaggacaaggacgccgtcgtgggcggcggcagcagcccgtgcgaggttggagaggcgaaggcgccggactccaagaaatgcaaagcggaggtgaatcccaaggtggaagaagccgccagcgatggctcggtgggagacagagtgcagaagcaaggaaaggggaagaactcatccaagccggccgccgagccgcccaaggactacgtccatgtccgggcacggcgaggtcaggccactgacagccacagccttgcagagagggttagaagagagaagattagccagcggatgaaagtgcttcaggacctggtgcctggatgcaacaaggtggttggcaaggcactcatgcttgatgagatcataaactacgtgcaatcgttgcagcagcaggtcgagttcctgtccatgaagctcgcgaccgtgaatccgcagctcgactttggcaacctatctacactcttacagaaagatatgttccaatcttgtggcccttcggtgaattccgtatttcctttggaaagtgccggtacagcttttccattttgtgaccaagcagattttttccagtcatttggtctgggagccatggaaaaccaatgtagcctagatctggcaaacacagctctaccccacacagggagcacacagtatgcttttcagaagcagcaaagggatctctgggaggataatactttccagtataacgacgaacaaagccaggaggatgcggtttctgcaccgaatttcgatggtcagttgcaagcagcagatcacacagagatcgagttctag

SEQ ID NO: 513 - protein, 366 aa, Oryza sativa
MDSDYVAGLLMSAAAAGLDLGVLDGGGGAFLETLCGGPGFAERAARLCGGGAGLFGLPAVGNAERGGCSREGSSVSDPAWAHATGGGGDNARKRKAPASAAAGKDKDAVVGGGSSPCEVGEAKAPDSKKCKAEVNPKVEEAASDGSVGDRVQKQGKGKNSSKPAAEPPKDYVHVRARRGQATDSHSLAERVRREKISQRMKVLQDLVPGCNKVVGKALMLDEIINYVQSLQQQVEFLSMKLATVNPQLDFGNLSTLLQKDMFQSCGPSVNSVFPLESAGTAFPFCDQADFFQSFGLGAMENQCSLDLANTALPHTGSTQYAFQKQQRDLWEDNTFQYNDEQSQEDAVSAPNFDGQLQAADHTEIEF

SEQ ID NO: 514 - DNA, 1704 bp, Prunus persica
atgggaaaagacagaacagccacaccctcttggaacccttcgagttttggcatggaaatgcagtccaatgagctcaattgtggctcacagcagctccccaattctctttttaatgccaattgggacaattcaatggatcagagcgatccctttgagtctgccttgagctccattgtttcttctccggcggcgtccaacgccgccatcgctgcgggcaaaggcggcggcgatggagaaatgattagagaactaattggaagattaggaagcatttgcaattcaggagaaatatcttcacactcttacatgtgtggcaataacagcactaacacttcatgttatagcaccccattgaactcttcacctaagctgaacctgtcaatgattgatccacagatgagaggcaatttgccaattcctggaaatcatttaccttcacatccaagtttggcaccttttcaagctgaccctggatttgttgagagggctgcaaggttttcctgctttggtggtggcaattttggtggcctcaatgggcaggtcaacttgaatgaagctgaattggcttatagatcaatgccaaaaattgattctggcaagctttccagagcttccagcaaccaatcacttaaagttgctgctggatctcaattgggtgttcaagaaagcaacaaaagctctccccagggtgggaattcagctcctgataagaaattcggcaggttttcgaggtcctccaccccagaaaatgctgaattaggtgattcaagggaaggatcatcagtttctgagcagatcccaggtggggatatgagtgtgaaagcagaaaatgtgaccaattccaggaaaaggaaacctgttgcaagaggaaaagccaaagaaacctcttcatctccctctgttaaagatggcaaggttgtggcagaaaaagaggaaccaaattccaagagaagcaaaacagatgaagcttctgggaacgaaaaggcagctgcaaaggcaaagatagagcccagtggaggttccaaagctacaggggatggggctcaaaagcaaacaaaggataattcagagcctcctgaggctccaaaggactatattcatgtcagagccagaaggggtcaagctactgatagccatagtcttgcagaaagagttcgaagagagaaaattagcgaaaggatgaaatttcttcaagatcttgttcctggttgcaacaaggtaactggaaaagcagtgatgctagatgaaattataaattatgtacagtcattgcagcgccaagttgagtttctttcaatgaaattgtcaactgtaaatcccagaatggatttgaacatggaggctcttctgtcaaaggagattcttcaatctcgtgggtctttacaaaatgccctttaccaattagattctgcaataccttcattccctttcgggtaccagccgcagcaactgccacctttgcatagcagcagcatctctagtgggacagagacacaatttccagagagccctctaaatgctgcaatgcgtcaaagtcaaggcatgcagttacccacatttgatagatttggtggagcagcacctcaagctccacaattctttgaggatgaccttcaaagtgtggttcagatgggatttggccagattcagcaggagagccttcatggttcaatggcttcagcccagatgaaagttgagctataa

SEQ ID NO: 515 - protein, 567 aa, Prunus persica
MGKDRTATPSWNPSSFGMEMQSNELNCGSQQLPNSLFNANWDNSMDQSDPFESALSSIVSSPAASNAAIAAGKGGGDGEMIRELIGRLGSICNSGEISSHSYMCGNNSTNTSCYSTPLNSSPKLNLSMIDPQMRGNLPIPGNHLPSHPSLAPFQADPGFVERAARFSCFGGGNFGGLNGQVNLNEAELAYRSMPKIDSGKLSRASSNQSLKVAAGSQLGVQESNKSSPQGGNSAPDKKFGRFSRSSTPENAELGDSREGSSVSEQIPGGDMSVKAENVTNSRKRKPVARGKAKETSSSPSVKDGKVVAEKEEPNSKRSKTDEASGNEKAAAKAKIEPSGGSKATGDGAQKQTKDNSEPPEAPKDYIHVRARRGQATDSHSLAERVRREKISERMKFLQDLVPGCNKVTGKAVMLDEIINYVQSLQRQVEFLSMKLSTVNPRMDLNMEALLSKEILQSRGSLQNALYQLDSAIPSFPFGYQPQQLPPLHSSSISSGTETQFPESPLNAAMRQSQGMQLPTFDRFGGAAPQAPQFFEDDLQSVVQMGFGQIQQESLHGSMASAQMKVEL

SEQ ID NO: 516 - DNA, 1692 bp, Populus trichocarpa
atggagagtgagtactttttcaatgcaggagtccctccacaagcattgctctttgaaccaacctcaacctcttcatcgatgccagtttggcaatccctctcatctcccatggaaatgcaagataattgctcagcccgccgcttgttcaattccaactgggaaaagtcaacggatcacagtcctcactttgagtcttccctgagctcaatggtgtcctctccaggagtatcaaactgtaacgtgtccagtgagagctttatggtcagagaactgataggaaatctaggaaacattgacaacagcaacaaccctggtgagatctcaccgcattctcagccaatgttggcagcttcatatattacagctgccaataacagtgccaacacctcatgctatactactcctttgaattcaccacccaagctgaatatgcctgtcatggatcaattttcgaaagagcatttgaatatccccagtttgggaaaaccaatgggtttgaattccagtgtggcagaattcacagctgatccgggatttgccgagagagctgcaaagttctcttgctttggcagcaggagtttcaatggcagaatcagccagttggggctaaacaatgctgaaatggctaatggatgtaatccattgatgggaaatggcaagttggcgcgtgttgcgagtagtcctttactcaaggcagtgggatctcaaaagggtaacaagagtactccattgcaggatcgatccgaattgacaaattctcaggagtcctctgtatctgaacaaattccaagtggggaggcaggtttaaaggcctccaatgagttaaattccaggaaaagaaaagcactttccaagggaaaagcaaaacaatcagcatcaaacccaccagccagtgctacgaaggatgcagaaactgatgataattcaaacacgaaaagaatcaagccaaatgaaggagaagagaatgaaaatagtcctgttaaagcagaggaagagccaaagggcagcggagatgatatccaaaacaaggccaattcaaggcctcctgagcctcctaaggactacattcatgttagagcaaggaggggtcaagcaactgatagccatagccttgctgaaagagttcgaagagagaaaatcagtgaacgaatgaagcttctccaagatcttgtgcctggttgcaataaggtcacaggaaaagcccttatgcttgatgaaatcataaattacgtgcagtcattgcaacggcaagttgagttcctctctatgaagttggcttctgtgaataccaggctggattttaacatggacactctcatttcaaaagatattttccaatcaagccaaccattgccccatccaatatttccattagattcctcggcaccggcagcaatatttagccaccaacagcagcaaaatccaccactgcatagcaatatttctaatggggcagtgacccactgctctgtggacccattagataccactggactgtgccaaaccctcaatgctcagttacccccgcttgatggatttacccaaaatgctcatcagtatccaacattctgtgaagatgacctgcagaccattgttcagatgggttatggccagaatccaaacctggaaacatttctgccacaaaatttccatggttcaaatcaagtatcccacatgaaaatcgagctctaa

SEQ ID NO: 517 - protein, 563 aa, Populus trichocarpa
MESEYFFNAGVPPQALLFEPTSTSSSMPVWQSLSSPMEMQDNCSARRLFNSNWEKSTDHSPHFESSLSSMVSSPGVSNCNVSSESFMVRELIGNLGNIDNSNNPGEISPHSQPMLAASYITAANNSANTSCYTTPLNSPPKLNMPVMDQFSKEHLNIPSLGKPMGLNSSVAEFTADPGFAERAAKFSCFGSRSFNGRISQLGLNNAEMANGCNPLMGNGKLARVASSPLLKAVGSQKGNKSTPLQDRSELTNSQESSVSEQIPSGEAGLKASNELNSRKRKALSKGKAKQSASNPPASATKDAETDDNSNTKRIKPNEGEENENSPVKAEEEPKGSGDDIQNKANSRPPEPPKDYIHVRARRGQATDSHSLAERVRREKISERMKLLQDLVPGCNKVTGKALMLDEIINYVQSLQRQVEFLSMKLASVNTRLDFNMDTLISKDIFQSSQPLPHPIFPLDSSAPAAIFSHQQQQNPPLHSNISNGAVTHCSVDPLDTTGLCQTLNAQLPPLDGFTQNAHQYPTFCEDDLQTIVQMGYGQNPNLETFLPQNFHGSNQVSHMKIEL

SEQ ID NO: 518 - DNA, 1707 bp, Populus trichocarpa
atggaaagagataagttgtttgtgagcgagggagccaacacagcagcaaccatttggaattcttgcagttttggaatggaaatgcaagccaatgagctgagttgcggtccagagaaacttgccaattgctttctcaatcccaattgggacaactcattggatcagagcgatccctttgagtctgctttgagctccattgtctcatcacctgttgcatccggtgccaacgcaaacgccaacgccattcctaatgctggcgttggtggtgacagtcttatgattagagaacttattggaagactaggaaacatttgcaattctggagacatttcactacaatcttttgttaacaataataacaatagcactaacacttcttgctatagtaccccaatgaattcccctccaaagctgaatctctcgatgatggattcacaaatgagaggaaacctgccaattcctggaaacagcgtagtaaagcatccaggtttagcaccatttccagctgattttgtagagagggctgcacgatattcttgctttggtagcaacaatcctggaggcatcaataaacaattcggattgaatgaatccgaattgattaataggttgatgccacgagtagaacctggtaagctctcgagagtttcgagtaacaattcaatgaaggtcactgtatcgcaagcaaatgttcaagaaagcaacaagagctcaccccaggatgggagtttgaattctgaaaagaaattcagtaggcagtcaaggcctacaacatcagagaatggagattccagggaagaatcttcattgtctgagcaggtcccaggtgggaaattgagcatgaaatcccagaatgacgccaattccaggaaaagaaaatcaattcccagaggaaaagccaaagaaactccctcttcatctccatctgcttctgatgtcaaggttgcagcagagaatgatgaatcgaaggcaaaaagaagcaaatcggatgaaactaatggcagtgacaaggatacagcaaaggaaaaggaagaagaaaatggaaatcagaaacagaacaaaaataattcaaagccgccagagccaccaaaggattatatccatgtcagagccagaaggggtcaggctacagatagccacagtcttgctgaaagagttagaagagagaaaatcagtgaaagaatgaagttcctccaggatcttgttcccggatgcaataaggttactgggaaagcagtgatgcttgacgagattataaactatgtacagtcattgcagcgccaggttgagtttctgtcaatgaagttgtcatctgtgaatccgaggatggagatcaacatggaaactttgttgtccaaggatattttccaatcccgtggatctatgccacatagtctttatccattagatgcctccacgccggtattcccttatggttaccaatcccagcaagggttagccctgcaaaatggcatgccaagcaatgccgaaacccagttctctatgaacccattaaatgctgcgttgcggcgaaacccgagcatgcatttgccacaccttgatggtttcggtgatcctgctgctcttcaggcctcagccatgtgggaagacgaccttcaaagtgttgtgcagatgggatatggtcagaatcatcaggagagctttcaaggctcagtgccctcaactcacatgaaaattgagctataa

SEQ ID NO: 519 - protein, 568 aa, Populus trichocarpa
MERDKLFVSEGANTAATIWNSCSFGMEMQANELSCGPEKLANCFLNPNWDNSLDQSDPFESALSSIVSSPVASGANANANAIPNAGVGGDSLMIRELIGRLGNICNSGDISLQSFVNNNNNSTNTSCYSTPMNSPPKLNLSMMDSQMRGNLPIPGNSVVKHPGLAPFPADFVERAARYSCFGSNNPGGINKQFGLNESELINRLMPRVEPGKLSRVSSNNSMKVTVSQANVQESNKSSPQDGSLNSEKKFSRQSRPTTSENGDSREESSLSEQVPGGKLSMKSQNDANSRKRKSIPRGKAKETPSSSPSASDVKVAAENDESKAKRSKSDETNGSDKDTAKEKEEENGNQKQNKNNSKPPEPPKDYIHVRARRGQATDSHSLAERVRREKISERMKFLQDLVPGCNKVTGKAVMLDEIINYVQSLQRQVEFLSMKLSSVNPRMEINMETLLSKDIFQSRGSMPHSLYPLDASTPVFPYGYQSQQGLALQNGMPSNAETQFSMNPLNAALRRNPSMHLPHLDGFGDPAALQASAMWEDDLQSVVQMGYGQNHQESFQGSVPSTHMKIEL

SEQ ID NO: 520 - DNA, 957 bp, Phaseolus vulgaris
atggaagttaccaattctcaagaggaatctacaatatctgagcaaacaccgaatggagaaattgggatgaaaattcaccaagatatgacgaattccaggaaaagaaaagcatcttccaaaggaaaaaccagagaaacttctaactccatcaatccctccaagggtgttgaagtcaatgaggattcaaattcaatgcgcaccaagccaaatgatggtgagggaaatgaaaaagggccagtgaaggttgaggaagagtccaaagcagtggaagagaaacagaacaaaagcaactcaaaacctcctgagccaccaaaagattacattcatgtgagagcaagaagaggccaagccactgacagccatagtcttgcagaacgtgtacggagggagaaaatcagtgaacggatgaagctgctccaagatcttgtaccaggttgcaataaggtcactggcaaagcacttatgctggatgaaattataaattatgttcagtcattgcagcgtcaagttgagttcctgtctatgaagttggcttctgttaacacaaggatggatcttggtattgagaatcttgtttcaaaagatgtatttcaatctaataattctttggcaacacaccaaaatccaatattccctctagattcctcagcacaagccttttatgggcaccagcctcagcaaaacccagttatccataataacatacctaacagaacggtgacccactgctcagtggacccattagacacatctttgtgccaaaatcttgccttgcaattacctcccctaaatgggtttagtgaagttggctctcagtttccattaacattctgtgaggatgatctccacaccattgtgcagatggggtttggccaaactgcaaactggaaaacaccaattcaatccccaagtttcaacggttcaaataatgtaccccagatgaaagttgagctctga

SEQ ID NO: 521 - protein, 318 aa, Phaseolus vulgaris
MEVTNSQEESTISEQTPNGEIGMKIHQDMTNSRKRKASSKGKTRETSNSINPSKGVEVNEDSNSMRTKPNDGEGNEKGPVKVEEESKAVEEKQNKSNSKPPEPPKDYIHVRARRGQATDSHSLAERVRREKISERMKLLQDLVPGCNKVTGKALMLDEIINYVQSLQRQVEFLSMKLASVNTRMDLGIENLVSKDVFQSNNSLATHQNPIFPLDSSAQAFYGHQPQQNPVIHNNIPNRTVTHCSVDPLDTSLCQNLALQLPPLNGFSEVGSQFPLTFCEDDLHTIVQMGFGQTANWKTPIQSPSFNGSNNVPQMKVEL

SEQ ID NO: 522 - DNA, 1707 bp, Populus trichocarpa
atggaaagagataagttgtttgtgagcgagggagccaacacagcagcaaccatttggaattcttgcagttttggaatggaaatgcaagccaatgagctgagttgcggtccagagaaacttgccaattgctttctcaatcccaattgggacaactcattggatcagagcgatccctttgagtctgctttgagctccattgtctcatcacctgttgcatccggtgccaacgcaaacgccaacgccattcctaatgctggcgttggtggtgacagtcttatgattagagaacttattggaagactaggaaacatttgcaattctggagacatttcactacaatcttttgttaacaataataacaatagcactaacacttcttgctatagtaccccaatgaattcccctccaaagctgaatctctcgatgatggattcacaaatgagaggaaacctgccaattcctggaaacagcgtagtaaagcatccaggtttagcaccatttccagctgattttgtagagagggctgcacgatattcttgctttggtagcaacaatcctggaggcatcaataaacaattcggattgaatgaatccgaattgatcaataggttgatgccacgagtagaacctggtaagctctcgagagtttcgagtaacaattcaatgaaggtcactgtatcgcaagcaaatgttcaagaaagcaacaagagctcaccccaggatgggagtttgaattctgaaaagaaattcagtaggcagtcaaggcctacaacatcagagaatggagattccagggaagaatcttcattgtctgagcaggtcccaggtgggaaattgagcatgaaatcccagaatgacgccaattccaggaaaagaaaatcaattcccagaggaaaagccaaagaaactccctcttcatctccatctgcttctgatgtcaaggttgcagcagagaatgatgaatcgaaggcaaaaagaagcaaatcggatgaaactaatggcagtgacaaggatacagcaaaggaaaaggaagaagaaaatggaaatcagaaacagaacaaaaataattcaaagccgccagagccaccaaaggattatatccatgtcagagccagaaggggtcaggctacagatagccacagtcttgctgaaagagttagaagagagaaaatcagtgaaagaatgaagttcctccaggatcttgttcccggatgcaataaggttactgggaaagcagtgatgcttgacgagattataaactatgtacagtcattgcagcgccaggttgagtttctgtcaatgaagttgtcatctgtgaatccgaggatggagatcaacatggaaactttgttgtccaaggatattttccaatcccgtggatctatgccacatagtctttatccattagatgcctccacgccggtattcccttatggttaccaatcccagcaagggttagccctgcaaaatggcatgccaagcaatgccgaaacccagttctctatgaacccattaaatgctgcgttgcggcgaaacccgagcatgcatttgccacaccttgatggtttcggtgatcctgctgctcttcaggcctcagccatgtgggaagacgaccttcaaagtgttgtgcagatgggatatggtcagaatcatcaggagagctttcaaggctcagtgccctcaactcaaatgaaaattgagctataa

SEQ ID NO: 523 - protein, 568 aa, Populus trichocarpa
MERDKLFVSEGANTAATIWNSCSFGMEMQANELSCGPEKLANCFLNPNWDNSLDQSDPFESALSSIVSSPVASGANANANAIPNAGVGGDSLMIRELIGRLGNICNSGDISLQSFVNNNNNSTNTSCYSTPMNSPPKLNLSMMDSQMRGNLPIPGNSVVKHPGLAPFPADFVERAARYSCFGSNNPGGINKQFGLNESELINRLMPRVEPGKLSRVSSNNSMKVTVSQANVQESNKSSPQDGSLNSEKKFSRQSRPTTSENGDSREESSLSEQVPGGKLSMKSQNDANSRKRKSIPRGKAKETPSSSPSASDVKVAAENDESKAKRSKSDETNGSDKDTAKEKEEENGNQKQNKNNSKPPEPPKDYIHVRARRGQATDSHSLAERVRREKISERMKFLQDLVPGCNKVTGKAVMLDEIINYVQSLQRQVEFLSMKLSSVNPRMEINMETLLSKDIFQSRGSMPHSLYPLDASTPVFPYGYQSQQGLALQNGMPSNAETQFSMNPLNAALRRNPSMHLPHLDGFGDPAALQASAMWEDDLQSVVQMGYGQNHQESFQGSVPSTQMKIEL

SEQ ID NO: 524 - DNA, 1335 bp, Ricinus communis
atgaatagagcattgttgccggagatgttgcactgcacggacttgacagttcttgaaagacaaagggctcgtttgaaatggcaacaagaacagcaacatcttcaactagaacaacatcagcatcagcatcatcaaggggagaattattttcttggtgatttaagtggggtgtttcaattgcagcagcagcagcaacagcaacaaggttttcagggtgatcttggtgaggttgtgatccgctctgtgaagcctgaccctggtttcttagataatggatgctggagtaatacttctagtactgatctggttggctatggtccttgcgggtttgggaatatgaactttgctatttctaggacttctagctgcccgcccaccgtggcagatgctgggccggttttagtcaaaggcagagagtctgttgtttcagagaaattgacttgtggagttggtagtgagagtaccaagaaaagaaaggttgataaggtccagaataatacaaaggttgttgcagaagatgacaactgcagggacaaaaggatcaaagtatgtgcagaagaaggagagtcaaagatgatcactgagaaaaataacaataataaaagcagtagcagcaaaaacagtaacaaggaaaattctgctgagacttccaaggataattcaaaagtaactgaggttcaaaagcctgattacattcatgtccgggcacgacgcggtcaagccactgatagccatagcttggctgaaagagtgagaagggaaaaaatcagtgagagaatgaagtatttgcaagatttggtgccaggatgtaacaaaattacaggaaaggcgggcatgcttgatgaaatcattaactatgttcaatctcttcaacgacaagtagaattcttgtcgatgaaactagctgctgtcaatccaaggcttgactttaacatcgataatttgattgcaaaagagacatttcctccttgtccaaccaattttccagcgattgggttgtcatcagatatgactaatcctgcctatcttcagtttaaccctgtacaacagcagcagcagcaacaacaacagcaacaactagtgacatgttgtggattggatatggggataaataatcctgatatggggattagaagaaccattagtgctcccgtgtcaatccctgaatcctatattgactcatcatgcttcaatcaaatccagtcctcgtcaacatgggatgctgatctacaaaatctttacaatgtagcttttgatcaaggaagatcaacatccttcccaactcagccatttacaggtgccattgacgctggcaatctgaagatggagatgtga

SEQ ID NO: 525 - protein, 444 aa, Ricinus communis
MNRALLPEMLHCTDLTVLERQRARLKWQQEQQHLQLEQHQHQHHQGENYFLGDLSGVFQLQQQQQQQQGFQGDLGEVVIRSVKPDPGFLDNGCWSNTSSTDLVGYGPCGFGNMNFAISRTSSCPPTVADAGPVLVKGRESVVSEKLTCGVGSESTKKRKVDKVQNNTKVVAEDDNCRDKRIKVCAEEGESKMITEKNNNNKSSSSKNSNKENSAETSKDNSKVTEVQKPDYIHVRARRGQATDSHSLAERVRREKISERMKYLQDLVPGCNKITGKAGMLDEIINYVQSLQRQVEFLSMKLAAVNPRLDFNIDNLIAKETFPPCPTNFPAIGLSSDMTNPAYLQFNPVQQQQQQQQQQQLVTCCGLDMGINNPDMGIRRTISAPVSIPESYIDSSCFNQIQSSSTWDADLQNLYNVAFDQGRSTSFPTQPFTGAIDAGNLKMEM

SEQ ID NO: 526 - DNA, 1305 bp, Solanum lycopersicum
atgaatattgcattaccagaaatgctacataacatcactagcaatggaagctcagaattgagcgtgcttgatagaacgaaatggcaggtgcagcaacaagagatgagttattttaatggacaaaatgatcaactcatgaattcttttcatcaaacggctgaagctcaacaatttcatggtctgatcaatgtaaacgatcagagtcttaatgagcttgtgactcgggcaataaagccagacccctgtatggagaacagttggggtggttttgggaccactggtactaatggttttgattatgttccagttggagttggacacggaggaatgtcacacccatctgaaatgaactatgctatttcaagaactacaagttgcccgcctaccatggcggacaatgttgttaaacccaaagacactaggctgagttctaacagaggcagagagagcttcaagaaaaggaaagcagataagaatcagcatctcaaggaggttgcagaagaggaaaccaaagacaagaaattgaaagaatgcatcgaagaggaggatgattcttccaaggtaacaacagagaaaaaaagcaacaaaaggagtgcgactaacagtagcaacagtaaggaaaattctgatacttcaaaggagaagtccaaaattaccgatgataaaaagctcgactatatacatgtcagagcacgtcgaggtcaagccactgatagtcacagtttggctgaaagagtaagaagggaaaagatcagtgagagaatgagattcctgcaagatttagtaccaggttgtaacaagataacagggaaagcaggaatgctagatgaaataatcaactacgtccaatctctccaaagacaagtagagttcctatccatgaaactagctgctgttaatccaaggcttgatatcgatgcagacaatttcttcaacaaagatatatttgcaactagcacgtctactttttccgcagtgggagctggaacatcatctgaaatgcttagtatggcccaacgccagttcaattcattgcagcaaataatgtcaagttctggattagaaatgggtattgtaaatctaaacgaaatggcactacgtagaaccactagcgctcctgtaccaattcctgaaatgtttctcgactcatcaagtatcaatcaagttcagagctttcaaacttggaacactgatttagataacatgtatgcaatggagcttcaacaaggaagatcagcacagtttcttccccatccgtgtacaggttttgctgaagctggacatgacctgaagatggaaatgtga

SEQ ID NO: 527 - protein, 434 aa, Solanum lycopersicum
MNIALPEMLHNITSNGSSELSVLDRTKWQVQQQEMSYFNGQNDQLMNSFHQTAEAQQFHGLINVNDQSLNELVTRAIKPDPCMENSWGGFGTTGTNGFDYVPVGVGHGGMSHPSEMNYAISRTTSCPPTMADNVVKPKDTRLSSNRGRESFKKRKADKNQHLKEVAEEETKDKKLKECIEEEDDSSKVTTEKKSNKRSATNSSNSKENSDTSKEKSKITDDKKLDYIHVRARRGQATDSHSLAERVRREKISERMRFLQDLVPGCNKITGKAGMLDEIINYVQSLQRQVEFLSMKLAAVNPRLDIDADNFFNKDIFATSTSTFSAVGAGTSSEMLSMAQRQFNSLQQIMSSSGLEMGIVNLNEMALRRTTSAPVPIPEMFLDSSSINQVQSFQTWNTDLDNMYAMELQQGRSAQFLPHPCTGFAEAGHDLKMEM

SEQ ID NO: 528 - DNA, 1332 bp, Solanum lycopersicum
atggataatgactgcttctctaatggtggaattcaaccaccattccattttgaccgcaaaattccattaaactctctacattcacctcaagaacaaaattcagattactttctaaacacccattgggataataattctacagataatcaatacacccgttttgattcagctttgagttcgatagtttcatctccagtaccctccaactctgtaaattccaattcatcactctgtgaattgattgggaaattgggttcaatttgtacttctcctgcaaccccatttactagtaactgtgattcgacgagaacttcgtgttatactacacccatgagctctcctccgaaattacatatacccataatgaaccaaattggaaaagataaagtacccaatttggggaattcagctgttatgaattctcctccatttccctctctttcagctgctaagttctcttgttttggtagccgaagttttaatggcagaacgagtcagtttgagctgaataatgaagattcgcggtatggatctggtactggggttatggggataggaaatttaactagaatatcgagtagcccttgtgttgtgcaaaacaaaaactcaagcctaatgatgtgtgagagattgaatttgggcaaaatttcaggtcgtaatgaagagtgttctgtttctgagcaagacccaaatggtgaaatggggtcaaaaacaagaaatgtattgaattctaagaaaagaaaagcagtgaaatcaaaggattttgtgccaattgtagatgaaactggaaaaaagagagcaaaatcaacacaaggtaatgggagcaacaatggaactgttaaaatggaggaacaaaagggcaatgaagatgatggagctgagaaagaaacaaaggaaaatcgaaagattgcagagccaccaaaggattacattcatgttagagcaagaaggggtcaagctactgatagccatagtttagctgaaagagtccgcagagaaaagatcagtcaaagaatgaagcttttgcaagatcttgtaccaggctgtaacaaggtgactggaaaagcattgatgctcgacgaaattataaattacgtccggtcactccaacaccaagttgagttcttgtctatgaagttggcttcagtgaacccaagaacggatattcacatcgatagtctccttcacacagaaataagtcaaccaagtggttctttgcaccaacatgttttcccagtagatggatatgctgaaaatcttgctcagcttcccacaatctgtgaggatgatctccaaagcattgtccagatgggatttaatcagaaactctaa

SEQ ID NO: 529 - protein, 443 aa, Solanum lycopersicum
MDNDCFSNGGIQPPFHFDRKIPLNSLHSPQEQNSDYFLNTHWDNNSTDNQYTRFDSALSSIVSSPVPSNSVNSNSSLCELIGKLGSICTSPATPFTSNCDSTRTSCYTTPMSSPPKLHIPIMNQIGKDKVPNLGNSAVMNSPPFPSLSAAKFSCFGSRSFNGRTSQFELNNEDSRYGSGTGVMGIGNLTRISSSPCVVQNKNSSLMMCERLNLGKISGRNEECSVSEQDPNGEMGSKTRNVLNSKKRKAVKSKDFVPIVDETGKKRAKSTQGNGSNNGTVKMEEQKGNEDDGAEKETKENRKIAEPPKDYIHVRARRGQATDSHSLAERVRREKISQRMKLLQDLVPGCNKVTGKALMLDEIINYVRSLQHQVEFLSMKLASVNPRTDIHIDSLLHTEISQPSGSLHQHVFPVDGYAENLAQLPTICEDDLQSIVQMGFNQKL

SEQ ID NO: 530 - DNA, 657 bp, Solanum tuberosum
atggaggaatcaaaggatgatgaaatccaaaaacaagttatggaaaatcaaaagcctcctgaaccaccaaaggactatattcatgttagggcaaggagaggacaagctactgatagccatagtctagcagaaagagtgagacgagagaagattagtgaaagaatgaagctgttacaagatcttgtaccaggctgtaataaggtgacaggaaaagcactaatgcttgatgaaattataaattatgtacagtcactccaacgacaagtcgagttcctatccatgaagttggcaacagtgaacccaaatttggattatcccctttccaaggatatatgtcaaccaaatggctctctgccccatcctgttttcccagtagataaaacatcatcttcttaccaacaaggccggagcgatattcctaatggggcactaagtcgatgctcagtggacacgttagataactcactatgccgcagcctaggaatgcaattgcctccccttgatggatttgctgaatatcttaatcagttccctgcaatatgcgaggatgacctgcaaagctttgtgcagatgggatttagccaaaaccccacaaaggatatgacactgcaatcacaagggcctcatcaaacgtctcacatgaaaattgagatgtag

SEQ ID NO: 531 - protein, 218 aa, Solanum tuberosum
MEESKDDEIQKQVMENQKPPEPPKDYIHVRARRGQATDSHSLAERVRREKISERMKLLQDLVPGCNKVTGKALMLDEIINYVQSLQRQVEFLSMKLATVNPNLDYPLSKDICQPNGSLPHPVFPVDKTSSSYQQGRSDIPNGALSRCSVDTLDNSLCRSLGMQLPPLDGFAEYLNQFPAICEDDLQSFVQMGFSQNPTKDMTLQSQGPHQTSHMKIEM

SEQ ID NO: 532 - DNA, 1071 bp, Triphysaria sp,
atggggaatgggaaattatcccgtgtatcaagcagccctgttctcaagcaagatggatcgttgaaaaagcagatggaaatccccaggcccggaaatagtaattataataataataataataacggggttgttttggggtctgagatgaaattcagtaaattatcggggtcaaatggtaattcttccaatgaagagtcctctgtttctgagcaaacaggttccaaggcttcgaatgagatgaattctcggaagaggaaagtggtttccagagggaaaagtaaggaagatggatcaaatttagctaagagagttgaaggggttgaaaatgaaaatgcaaaacgttcaaagacgacaaaaagtgtcaaaattgagaccaaaacagaggatgaaacaaagggaggatcaaatgatgagagtgagaaacaaaaggcagctgagccaccaaaggattatattcatgtcagggcaagaaggggtcaagccacagatagccatagtctagctgaaagagtccgtcgcgagaaaattagcgagcgaatgaaacttcttcaggatattgtaccaggttgcaataaggtgactggaaaagcacttatgcttgatgaaatcatcaactacgttcagttattacagcgccaggtcgagtttctgtcaatgaaattggcctcagtcaatacaggcctggatgtcaacatggaaaaccttatctccaaggacatgtttcagcaaaatgcaattactctgccccaacaaatttaccctttcgattcatcttcaccagcagcagcagcagcattctatcatcagcaaaacgtacaacaactacagcacaatagtaccaacatttcaggcggcccgttgagccaatgtccaggggaccctttatctttggatctacggaatttaggaatccatttgccttttgtcgatggatttaatgaaactcttcatcagcagttcccttcaatcagtgaagatgatatgcagagcatgattcacatgggttttgttcaaaatccaattggctttcctgtccaaaatcaaacggccaacatgaaagttgaaaggtga

SEQ ID NO: 533 - protein, 356 aa, Triphysaria sp,
MGNGKLSRVSSSPVLKQDGSLKKQMEIPRPGNSNYNNNNNNGVVLGSEMKFSKLSGSNGNSSNEESSVSEQTGSKASNEMNSRKRKVVSRGKSKEDGSNLAKRVEGVENENAKRSKTTKSVKIETKTEDETKGGSNDESEKQKAAEPPKDYIHVRARRGQATDSHSLAERVRREKISERMKLLQDIVPGCNKVTGKALMLDEIINYVQLLQRQVEFLSMKLASVNTGLDVNMENLISKDMFQQNAITLPQQIYPFDSSSPAAAAAFYHQQNVQQLQHNSTNISGGPLSQCPGDPLSLDLRNLGIHLPFVDGFNETLHQQFPSISEDDMQSMIHMGFVQNPIGFPVQNQTANMKVER

SEQ ID NO: 534 - DNA, 1290 bp, Vitis vinifera
atgggtattgatgacaatggtaatatggggtttccaaatacaagtcagagtattttgaattgcccatcttcagggatgaacacacatccaatctctgagaaggttacaggaatgacaatgagctcggcgtccatgtataaatcttcaaatggaggagaccctttctttggttctggttgggatcccattgtgtccttaagtcagaatgagaattttggagggtcttcaatggtttctcacagtgagtttgctaattctgcttaccctgttgtactggaaaatcagggaattggtagcaccccccaccttgttctctacccatctaattcaagtctagtagagatggtgccgaagcttccatgctttggcagtgggagtttctccgaaatggttgcttcgtttggcctacctgagtgtggccagactgctaattctgggtgccctccaaattttcccccaaacaaggagggtctcactgagaaaagcttaaatggtgcacaatctcaagagggccaccaaatttcagaaggcgatgccgtggatgcttcacctagtggaaagagaagaaaaagttcctttgatcctcgtcctccattgaataccagcaagagtgctgatggagaacaaccaaagggtctcccttgggaaaattctgagttttcaaaagaacaagaagagaagaaactaaagattgatcaaaacatgagtccaaatttacgtggtaagcaaccaaataaacatgctaaagacaattctagcaatggagaagctcctaaagaaaattacattcacgtgagggccagaaggggccaggcgactaatagtcacagccttgctgaaagggtcagaagagaaaagatcagtgagcgtatgagactgcttcaagaacttgttccaggatgtaataagattactgggaaggcagtaatgcttgatgagattatcaattatgtacagtcactgcaacaacaggttgagtttctgtcaatgaaacttgccactgtcaatccagaactgaacattgatatagaacgacttctatcgaaagatattcttaattcacggggtggcagtacatctgttcttgggtttggtccaggaatgagctcttctcatccttacccgcatggaatttcccagggaaccttgccaggtatcccgactccacaatttcattccactcaggctgtatgggatggtgaactccaaagtcttctccaaatgggatttgattctaacccatctagcaacaatctgggaacaaatggtaagtgtcagaagttcatttga

SEQ ID NO: 535 - protein, 429 aa, Vitis vinifera
MGIDDNGNMGFPNTSQSILNCPSSGMNTHPISEKVTGMTMSSASMYKSSNGGDPFFGSGWDPIVSLSQNENFGGSSMVSHSEFANSAYPVVLENQGIGSTPHLVLYPSNSSLVEMVPKLPCFGSGSFSEMVASFGLPECGQTANSGCPPNFPPNKEGLTEKSLNGAQSQEGHQISEGDAVDASPSGKRRKSSFDPRPPLNTSKSADGEQPKGLPWENSEFSKEQEEKKLKIDQNMSPNLRGKQPNKHAKDNSSNGEAPKENYIHVRARRGQATNSHSLAERVRREKISERMRLLQELVPGCNKITGKAVMLDEIINYVQSLQQQVEFLSMKLATVNPELNIDIERLLSKDILNSRGGSTSVLGFGPGMSSSHPYPHGISQGTLPGIPTPQFHSTQAVWDGELQSLLQMGFDSNPSSNNLGTNGKCQKFI

SEQ ID NO: 536 - DNA, 672 bp, Zingiber officinale
atggatcctcccgaggaggaaaactctgactcaaagagatgcaaagcagcggaagccggcggcgccgacaaggatgcgcccgtcaaacccaagaccgagcagaacagcagcgacgacggcaatgccaagccgccggagccgcccaaggactacatccatgtcagggcaagaagagggcaagccaccgatagccatagcctcgccgagagggtcagaagagagaagatcagcgagaggatgaaactactgcaagatcttgtgccaggctgcaacaaggtcacaggaaaggctgttatgctcgatgagataatcaactatgtgcagtccttgcagcggcaagtcgagttcttgtccatgaagctggccaccttggatccccagctcgagttcgacacggagactcttctctcgaaagaaatgcatcaagttcatgtgccattgccacagcaagtcctctttccattagacatggcgacctcagctttctcacttgctcagctgcctctgaagcttgctgagaacccgccggactcgatgttttcgagcttgcaactacctcctatcgatcatcttgccaatctctgggaagacgaccttcggtatgtcgttcagaccgggttcccgcagagccaggaggcaccattctcctccggagctcttcgagccgagtga

SEQ ID NO: 537 - protein, 223 aa, Zingiber officinale
MDPPEEENSDSKRCKAAEAGGADKDAPVKPKTEQNSSDDGNAKPPEPPKDYIHVRARRGQATDSHSLAERVRREKISERMKLLQDLVPGCNKVTGKAVMLDEIINYVQSLQRQVEFLSMKLATLDPQLEFDTETLLSKEMHQVHVPLPQQVLFPLDMATSAFSLAQLPLKLAENPPDSMFSSLQLPPIDHLANLWEDDLRYVVQTGFPQSQEAPFSSGALRAE

SEQ ID NO: 538 - protein, 50 aa, Artificial sequence
  motif 2
  VARIANT (25)..(25): / replace = "Arg"
  VARIANT (31)..(31): / replace = "Arg"
  VARIANT (32)..(32): / replace = "Ile" / replace = "Phe"
  VARIANT (35)..(35): / replace = "Leu"
  VARIANT (41)..(41): / replace = "Asp"
  VARIANT (43)..(43): / replace = "Val"
  VARIANT (48)..(48): / replace = "Val"
YIHVRARRGQATDSHSLAERVRREKISERMKLLQDLVPGCNKITGKALML

SEQ ID NO: 539 - protein, 29 aa, Artificial sequence
  Motif 3
  VARIANT (12)..(12): / replace = "Asn"
  VARIANT (23)..(23): / replace = "Thr"
  VARIANT (25)..(25): / replace = "Ser"
  VARIANT (27)..(27): / replace = "Leu" / replace = "Val"
  VARIANT (29)..(29): / replace = "Tyr"
DEIINYVQSLQRQVEFLSMKLASVNPRLD

SEQ ID NO: 540 - protein, 11 aa, Artificial sequence
  motif 4
  VARIANT (1)..(1): / replace = "Asn"
  VARIANT (2)..(2): / replace = "Ser"
  VARIANT (3)..(3): / replace = "Lys"
  VARIANT (7)..(7): / replace = "Ala"
  VARIANT (8)..(8): / replace = "Ala"
  misc_feature (9)..(9): Xaa can be any naturally occurring amino acid
  VARIANT (10)..(10): / replace = "Gly"
  VARIANT (11)..(11): / replace = "Gly" / replace = "Ser"
MARKRKSRXKF

SEQ ID NO: 541 - protein, 50 aa, Artificial sequence
  motif 5
  VARIANT (6)..(6): / replace = "Arg"
  VARIANT (12)..(12): / replace = "Lys"
  VARIANT (13)..(13): / replace = "Ile" / replace = "Val"
  VARIANT (16)..(16): / replace = "Arg" / replace = "Leu" / replace = "Ser"
  VARIANT (24)..(24): / replace = "Val"
  VARIANT (30)..(30): / replace = "Ile"
RVRREKISERMRMLQALVPGCDKITGKALMLDEIINYVQSLQNQVEFLSM

SEQ ID NO: 542 - protein, 29 aa, Artificial sequence
  motif 6
  UNSURE (1)..(1): / replace = "Arg" / replace = "Ser"
  UNSURE (4)..(4): / replace = "Glu"
  UNSURE (5)..(5): / relpace = "Gly" / relpace = "Asp"
  UNSURE (7)..(7): / relpace = "Ala" / relpace = "Glu"
  UNSURE (9)..(9): / replace = "Ala" / replace = "Thr"
KKVHEEPPKGYIHVRARRGQATDSHSLAE

SEQ ID NO: 543 - protein, 16 aa, Artificial sequence
  motif 7
  VARIANT (1)..(1): / replace = "Arg"
  VARIANT (2)..(2): / replace = "Ile"
  VARIANT (5)..(5): / replace = "Met" / replace = "Val"
  VARIANT (6)..(6): / replace = "Asn"
  VARIANT (8)..(8): / replace = "Leu" / replace = "Met"
  VARIANT (9)..(9): / replace = "Phe"
  VARIANT (11)..(11): / replace = "Gly"
  VARIANT (16)..(16): / replace = "Ser" / replace = "Arg"
KLASLSPVLYDFGMDL

SEQ ID NO: 544 - protein, 59 aa, Artificial sequence
  bHLH domain of SEQ ID NO: 407
RRGQATDSHSLAERVRRERISERMKILQLLVPGCDKITGKALMLDEIINYVQSLQNQVE

SEQ ID NO: 545 - DNA, 2194 bp, Oryza sativa; identical to SEQ ID NO: 306

SEQ ID NO: 546 - DNA, 3642 bp, Artificial sequence
  expression vector 1
aatccgaaaagtttctgcaccgttttcaccccctaactaacaatatagggaacgtgtgctaaatataaaatgagaccttatatatgtagcgctgataactagaactatgcaagaaaaactcatccacctactttagtggcaatcgggctaaataaaaaagagtcgctacactagtttcgttttccttagtaattaagtgggaaaatgaaatcattattgcttagaatatacgttcacatctctgtcatgaagttaaattattcgaggtagccataattgtcatcaaactcttcttgaataaaaaaatctttctagctgaactcaatgggtaaagagagagattttttttaaaaaaatagaatgaagatattctgaacgtattggcaaagatttaaacatataattatataattttatagtttgtgcattcgtcatatcgcacatcattaaggacatgtcttactccatcccaatttttatttagtaattaaagacaattgacttatttttattatttatcttttttcgattagatgcaaggtacttacgcacacactttgtgctcatgtgcatgtgtgagtgcacctcctcaatacacgttcaactagcaacacatctctaatatcactcgcctatttaatacatttaggtagcaatatctgaattcaagcactccaccatcaccagaccacttttaataatatctaaaatacaaaaaataattttacagaatagcatgaaaagtatgaaacgaactatttaggtttttcacatacaaaaaaaaaaagaattttgctcgtgcgcgagcgccaatctcccatattgggcacacaggcaacaacagagtggctgcccacagaacaacccacaaaaaacgatgatctaacggaggacagcaagtccgcaacaaccttttaacagcaggctttgcggccaggagagaggaggagaggcaaagaaaaccaagcatcctcctcctcccatctataaattcctccccccttttcccctctctatataggaggcatccaagccaagaagagggagagcaccaaggacacgcgactagcagaagccgagcgaccgccttcttcgatccatatcttccggtcgagttcttggtcgatctcttccctcctccacctcctcctcacagggtatgtgcccttcggttgttcttggatttattgttctaggttgtgtagtacgggcgttgatgttaggaaaggggatctgtatctgtgatgattcctgttcttggatttgggatagaggggttcttgatgttgcatgttatcggttcggtttgattagtagtatggttttcaatcgtctggagagctctatggaaatgaaatggtttagggtacggaatcttgcgattttgtgagtaccttttgtttgaggtaaaatcagagcaccggtgattttgcttggtgtaataaaagtacggttgtttggtcctcgattctggtagtgatgcttctcgatttgacgaagctatcctttgtttattccctattgaacaaaaataatccaactttgaagacggtcccgttgatgagattgaatgattgattcttaagcctgtccaaaatttcgcagctggcttgtttagatacagtagtccccatcacgaaattcatggaaacagttataatcctcaggaacaggggattccctgttcttccgatttgctttagtcccagaattttttttcccaaatatcttaaaaagtcactttctggttcagttcaatgaattgattgctacaaataatgcttttatagcgttatcctagctgtagttcagttaataggtaatacccctatagtttagtcaggagaagaacttatccgatttctgatctccatttttaattatatgaaatgaactgtagcataagcagtattcatttggattattttttttattagctctcaccccttcattattctgagctgaaagtctggcatgaactgtcctcaattttgttttcaaattcacatcgattatctatgcattatcctcttgtatctacctgtagaagtttctttttggttattccttgactgcttgattacagaaagaaatttatgaagctgtaatcgggatagttatactgcttgttcttatgattcatttcctttgtgcagttcttggtgtagcttgccactttcaccagcaaagttcatttaaatcaactagggatatcacaagtttgtacaaaaaagcaggcttaaacaatggcaggcttttcatatcaacatcaaccgttgtttcctgactcggctttcttgccaagcatagccacacccactaagaacatgaacaacaacatgtatggttcttttgaggaagctggaaacatgatgaataccaacggtttctcccaaatttactctcctgaaacttttcatgaaacacctagtcttgatgttagatttcatcaaagtagccatcctgatgatcatagctataaggtgtctcttagtgataatgagacttctttgactaaaaaacagagcacaaactcctcaaccgtggttgataagcttgaaagtgagcacgttactcaagaggtaactcccatggccaggaagaggaaaagtgctaatgggttcttgaattctgctcaatcaaaggatgctagaaaagtgaaaagcaagagacaaaataaatgcagtggtgacatgaaacacgaagagaagaagccaaaagttgagaagaaagttcatggagagcctccagcaggctacattcatgtaagagcaaggaggggccaagcaacagacagccacagccttgctgagagggtaagaagagagagaatcagtgagagaatgaagatactacagcttcttgttcctggctgtgacaagattactgggaaggcccttatgctggacgagattattaattatgttcagtccctgcaaaatcaagtggagttcctatccatgaagcttgcctctgttaatcccttgctctatgattttggaatggaccgtgatgcattcatggttagaccagagagattaagtagcatgtctccaccactgccatctctgcaacacaacagtcctatccagcccacagcttttgccgacaccgcctccgccaccaccgccacctttgctacagaagaaaataactatcctcttattgataattctgctacgctttttcttcaaggaatgaggcctagtgacttcactactcatcaggatagtggttacctaatgtgggatgtggatgagcaaagacaaaaatttcttaatccatctgggcttgccaccaacttgtgttctttccattaaaataaatataccaagcgctgccacccagctttcttgtacaaagtggtgatatcacaagcccgggcggtcttctagggataacagggtaattatatccctctagatcacaagcccgggcggtcttctacgatgattgagtaataatgtgtcacgcatcaccatgggtggcagtgtcagtgtgagcaatgacctgaatgaacaattgaaatgaaaagaaaaaaagtactccatctgttccaaattaaaattcattttaaccttttaataggtttatacaataattgatatatgttttctgtatatgtctaatttgttatcatcc

SEQ ID NO: 547 - DNA, 3552 bp, Artificial sequence
  expression vector 2
aatccgaaaagtttctgcaccgttttcaccccctaactaacaatatagggaacgtgtgctaaatataaaatgagaccttatatatgtagcgctgataactagaactatgcaagaaaaactcatccacctactttagtggcaatcgggctaaataaaaaagagtcgctacactagtttcgttttccttagtaattaagtgggaaaatgaaatcattattgcttagaatatacgttcacatctctgtcatgaagttaaattattcgaggtagccataattgtcatcaaactcttcttgaataaaaaaatctttctagctgaactcaatgggtaaagagagagattttttttaaaaaaatagaatgaagatattctgaacgtattggcaaagatttaaacatataattatataattttatagtttgtgcattcgtcatatcgcacatcattaaggacatgtcttactccatcccaatttttatttagtaattaaagacaattgacttatttttattatttatcttttttcgattagatgcaaggtacttacgcacacactttgtgctcatgtgcatgtgtgagtgcacctcctcaatacacgttcaactagcaacacatctctaatatcactcgcctatttaatacatttaggtagcaatatctgaattcaagcactccaccatcaccagaccacttttaataatatctaaaatacaaaaaataattttacagaatagcatgaaaagtatgaaacgaactatttaggtttttcacatacaaaaaaaaaaagaattttgctcgtgcgcgagcgccaatctcccatattgggcacacaggcaacaacagagtggctgcccacagaacaacccacaaaaaacgatgatctaacggaggacagcaagtccgcaacaaccttttaacagcaggctttgcggccaggagagaggaggagaggcaaagaaaaccaagcatcctccttctcccatctataaattcctccccccttttcccctctctatataggaggcatccaagccaagaagagggagagcaccaaggacacgcgactagcagaagccgagcgaccgccttctcgatccatatcttccggtcgagttcttggtcgatctcttccctcctccacctcctcctcacagggtatgtgcctcccttcggttgttcttggatttattgttctaggttgtgtagtacgggcgttgatgttaggaaaggggatctgtatctgtgatgattcctgttcttggatttgggatagaggggttcttgatgttgcatgttatcggttcggtttgattagtagtatggttttcaatcgtctggagagctctatggaaatgaaatggtttagggatcggaatcttgcgattttgtgagtaccttttgtttgaggtaaaatcagagcaccggtgattttgcttggtgtaataaagtacggttgtttggtcctcgattctggtagtgatgcttctcgatttgacgaagctatcctttgtttattccctattgaacaaaaataatccaactttgaagacggtcccgttgatgagattgaatgattgattcttaagcctgtccaaaatttcgcagctggcttgtttagatacagtagtccccatcacgaaattcatggaaacagttataatcctcaggaacaggggattccctgttcttccgatttgctttagtcccagaattttttttcccaaatatcttaaaaagtcactttctggttcagttcaatgaattgattgctacaaataatgcttttatagcgttatcctagctgtagttcagttaataggtaatacccctatagtttagtcaggagaagaacttatccgatttctgatctccatttttaattatatgaaatgaactgtagcataagcagtattcatttggattattttttttattagctctcaccccttcattattctgagctgaaagtctggcatgaactgtcctcaattttgttttcaaattcacatcgattatctatgcattatcctcttgtatctacctgtagaagtttctttttggttattccttgactgcttgattacagaaagaaatttatgaagctgtaatcgggatagttatactgcttgttcttatgattcatttcctttgtgcagttcttggtgtagcttgccactttcaccagcaaagttcatttaaatccttagggataggtaaacaatggcaggcttttcatatcaacatcaaccgttgtttcctgactcggctttcttgccaagcatagccacacccactaagaacatgaacaacaacatgtatggttcttttgaggaagctggaaacatgatgaataccaacggtttctcccaaatttactctcctgaaacttttcatgaaacacctagtcttgatgttagatttcatcaaagtagccatcctgatgatcatagctataaggtgtctcttagtgataatgagacttctttgactaaaaaacagagcacaaactcctcaaccgtggttgataagcttgaaagtgagcacgttactcaagaggtaactcccatggccaggaagaggaaaagtgctaatgggttcttgaattctgctcaatcaaaggatgctagaaaagtgaaaagcaagagacaaaataaatgcagtggtgacatgaaacacgaagagaagaagccaaaagttgagaagaaagttcatggagagcctccagcaggctacattcatgtaagagcaaggaggggccaagcaacagacagccacagccttgctgagagggtaagaagagagagaatcagtgagagaatgaagatactacagcttcttgttcctggctgtgacaagattactgggaaggcccttatgctggacgagattattaattatgttcagtccctgcaaaatcaagtggagttcctatccatgaagcttgcctctgttaatcccttgctctatgattttggaatggaccgtgatgcattcatggttagaccagagagattaagtagcatgtctccaccactgccatctctgcaacacaacagtcctatccagcccacagcttttgccgacaccgcctccgccaccaccgccacctttgctacagaagaaaataactatcctcttattgataattctgctacgctttttcttcaaggaatgaggcctagtgacttcactactcatcaggatagtggttacctaatgtgggatgtggatgagcaaagacaaaaatttcttaatccatctgggcttgccaccaacttgtgttctttccattaaaataaatataccaagcgctgcccctcgagacgcgtgatatcattctcgcccatcacaagccccgatgattgagtaataatgtgtcacgcatcaccatgggtggcagtgtcagtgtgagcaatgacctgaatgaacaattgaaatgaaaagaaaaaaagtactccatctgttccaaattaaaattggttttaaccttttaataggtttatacaataattgatatatgttttctatatatgtctaatttgttatcatcc

SEQ ID NO: 548 - DNA, 56 bp, Artificial sequence
  primer: prm15499
ggggacaagtttgtacaaaaaagcaggcttaaacaatggcaggcttttcatatcaa

SEQ ID NO: 549 - DNA, 51 bp, Artificial sequence
  primer: prm15500
ggggaccactttgtacaagaaagctgggtggcagcgcttggtatatttatt

SEQ ID NO: 550 - DNA, 56 bp, Artificial sequence
  primer: prm15497
ggggacaagtttgtacaaaaaagcaggcttaaacaatggcaactttctcttatttc

SEQ ID NO: 551 - DNA, 50 bp, Artificial sequence
  primer: prm15498
ggggaccactttgtacaagaaagctgggttttgtgtcgacatgtaatttt

SEQ ID NO: 552 - DNA, 54 bp, Artificial sequence
  primer: prm15501
ggggacaagtttgtacaaaaaagcaggcttaaacaatggcagccttttcgtatc

SEQ ID NO: 553 - DNA, 50 bp, Artificial sequence
  primer: prm15502
ggggaccactttgtacaagaaagctgggtagggcagctcttggtatctat

SEQ ID NO: 554 - DNA, 54 bp, Artificial sequence
  primer: prm14919
ggggacaagtttgtacaaaaaagcaggcttaaacaatgaatgagaaggacgcca

SEQ ID NO: 555 - DNA, 50 bp, Artificial sequence
  primer: prm14920
ggggaccactttgtacaagaaagctgggtcttgcttcagttgtggaatca

SEQ ID NO: 556 - protein, 51 aa, Artificial sequence
  motif 8
SLAERVRRERISERMKILQLLVPGCDKITGKALMLDEIINYVQSLQNQVEF

SEQ ID NO: 557 - protein, 58 aa, Artificial sequence
  motif 9
VRARRGQATDSHSLAERVRRERISERMKILQLLVPGCDKITGKALMLDEIINYVQSLQ

SEQ ID NO: 558 - protein, 51 aa, Artificial sequence
  motif 10
QATDSHSLAERVRRERISERMKILQLLVPGCDKITGKALMLDEIINYVQSL

SEQ ID NO: 559 - protein, 51 aa, Artificial sequence
  motif 11
ATDSHSLAERVRRERISERMKILQLLVPGCDKITGKALMLDEIINYVQSLQ

SEQ ID NO: 560 - protein, 80 aa, Artificial sequence
  motif 12
ARRGQATDSHSLAERVRRERISERMKILQLLVPGCDKITGKALMLDEIINYVQSLQNQVEFLSMKLASVNPLLYDFGMDR

SEQ ID NO: 561 - protein, 82 aa, Artificial sequence
  motif 13
ARRGQATDSHSLAERVRRERISERMKILQLLVPGCDKITGKALMLDEIINYVQSLQNQVEFLSMKLASVNPLLYDFGMDRDA

SEQ ID NO: 562 - protein, 129 aa, Artificial sequence; identical to SEQ ID NO: 318
  Consensus

SEQ ID NO: 563 - protein, 425 aa, Artificial sequence
  Consensus
  misc_feature (2)..(85): Xaa can be any naturally occurring amino acid
  misc_feature (87)..(139): Xaa can be any naturally occurring amino acid
  misc_feature (142)..(160): Xaa can be any naturally occurring amino acid
  misc_feature (163)..(224): Xaa can be any naturally occurring amino acid
  misc_feature (271)..(271): Xaa can be any naturally occurring amino acid
  misc_feature (292)..(292): Xaa can be any naturally occurring amino acid
  misc_feature (306)..(308): Xaa can be any naturally occurring amino acid
  misc_feature (312)..(312): Xaa can be any naturally occurring amino acid
  misc_feature (315)..(316): Xaa can be any naturally occurring amino acid
  misc_feature (319)..(321): Xaa can be any naturally occurring amino acid
  misc_feature (323)..(336): Xaa can be any naturally occurring amino acid
  misc_feature (338)..(339): Xaa can be any naturally occurring amino acid
  misc_feature (341)..(378): Xaa can be any naturally occurring amino acid
  misc_feature (380)..(394): Xaa can be any naturally occurring amino acid
  misc_feature (396)..(397): Xaa can be any naturally occurring amino acid
  misc_feature (399)..(419): Xaa can be any naturally occurring amino acid
  misc_feature (421)..(423): Xaa can be any naturally occurring amino acid
LXXXXXXXXXXXXXXXXXXXXXXXXXXXXXXXXXXXXXXXXXXXXXXXXXXXXXXXXXXXXXXXXXXXXXXXXXXXXXXXXXXXXLXXXXXXXXXXXXXXXXXXXXXXXXXXXXXXXXXXXXXXXXXXXXXXXXXXXXXRKXXXXXXXXXXXXXXXXXXXSKXXXXXXXXXXXXXXXXXXXXXXXXXXXXXXXXXXXXXXXXXXXXXXXXXXXXXXXXXXXXXXEEPPKDYIHVRARRGQATDSHSLAERVRREKISERMKLLQDLVPGCXKVTGKALMLDEIINYVQSLQXQVEFLSMKLASVNXXXLDFXMDXXLSXXXLXXXXXXXXXXXXXXLXXLXXXXXXXXXXXXXXXXXXXXXXXXXXXXXXXXXXXXXXMXXXXXXXXXXXXXXXLXXLXXXXXXXXXXXXXXXXXXXXXDXXXIV

1-92. (canceled)

93. A method for enhancing a yield-related trait in a plant relative to a control plant, comprising modulating expression in a plant of a nucleic acid encoding:
(i) an UPA20-like polypeptide, wherein said UPA20-like polypeptide comprises a bHLH domain, and preferably comprises one or more domains selected from the group consisting of SM00353, PTHR12565:SF7, PTHR12565, PF00010, PS50888, SSF47459; and G3DSA:4.10.280.10; or
(ii) a WAK-like polypeptide, wherein said WAK-like polypeptide comprises an EGF domain and a transmembrane domain.

94. The method of claim 93, wherein said modulated expression is effected by introducing and expressing in the plant said nucleic acid encoding an UPA20-like polypeptide or a WAK-like polypeptide.

95. The method of claim 93, wherein said enhanced yield-related trait comprises increased yield relative to a control plant, and preferably comprises increased biomass and/or increased seed yield relative to a control plant.

96. The method of claim 93, wherein said enhanced yield-related trait is obtained under non-stress conditions.

97. The method of claim 93, wherein said enhanced yield-related trait is obtained under conditions of drought stress, salt stress or nitrogen deficiency.

98. The method of claim 93, wherein said bHLH domain comprises an amino acid sequence having at least 50% overall sequence identity to the amino acid of SEQ ID NO: 544.

99. The method of claim 93, wherein said UPA20-like polypeptide comprises one or more of the following motifs:

| | |
|---|---|
| | (SEQ ID NO: 538) |
| (i) | Motif 2: YIHVRARRGQATDSHSLAERVRRE[KR]ISERM |
| | [KR][LIF]LQ[DL]LVPGC[ND]K[IV]TGKA[LV]ML; |
| | (SEQ ID NO: 539) |
| (ii) | Motif 3: DEIINYVQSLQ[RN]QVEFLSMKLA[ST]V[NS]P |
| | [RLV]L[DY]; |
| | and |
| | (SEQ ID NO: 540) |
| (iii) | Motif 4: [MN][AS][RK]KRK[SA][RA]x[KG][FGS]. |

100. The method of claim 99, wherein said UPA20-like polypeptide further comprises one or more of the following motifs:

| | |
|---|---|
| | (SEQ ID NO: 541) |
| (i) | Motif 5: RVRRE[KR]ISERM[RK][MIV]LQ[ARLS] |
| | LVPGCDK[IV]TGKAL[MI]LDEIINYVQSLQNQVEFLSM; |
| | (SEQ ID NO: 542) |
| (ii) | Motif 6: [KRS]KV[HE][EGD]E[PAE]P[KAT] |
| | GYIHVRARRGQATDSHSLAE; |
| | and |
| | (SEQ ID NO: 543) |
| (iii) | Motif 7: [KR][LI]AS[LMV][SN]P[VLM][LF]Y[DG] |
| | FGMD[LSR]. |

101. The method of claim 93, wherein said UPA20-like polypeptide comprises a conserved domain having at least 50% sequence identity to:
(i) amino acids 186 to 236 of SEQ ID NO: 2 (motif 8, SEQ ID NO: 556);
(ii) amino acids 174 to 231 of SEQ ID NO: 2 (motif 9, SEQ ID NO: 557);
(iii) amino acids 183 to 230 of SEQ ID NO: 2 (motif 10, SEQ ID NO: 558);
(iv) amino acids 181 to 231 of SEQ ID NO: 2 (motif 11, SEQ ID NO: 559);
(v) amino acids 176 to 255 of SEQ ID NO: 2 (motif 12, SEQ ID NO: 560); or
(vi) amino acids 176 to 257 of SEQ ID NO: 2 (motif 13, SEQ ID NO: 561).

102. The method of claim 93, wherein:
(i) said nucleic acid encoding a UPA20-like polypeptide is of plant origin, from a dicotyledonous plant, from a plant of the family Salicaceae, from a plant of the genus Populus, or from a Populus trichocarpa plant; or
(ii) said nucleic acid encoding a WAK-like polypeptide is of plant origin, from a monocotyledonous plant, from a plant of the family Poaceae, from a plant of the genus Oryza, or from a Oryza sativa plant.

103. The method of claim 93, wherein:
(i) said nucleic acid encoding a UPA20-like polypeptide encodes any one of the polypeptides listed in Table A3 or is a portion of such a nucleic acid, or a nucleic acid capable of hybridizing with such a nucleic acid;
(ii) said nucleic acid encoding a UPA20-like polypeptide encodes an orthologue or paralogue of any of the polypeptides given in Table A3;
(iii) said nucleic acid encoding a UPA20-like polypeptide encodes a polypeptide comprising the amino acid sequence of SEQ ID NO: 407 or a homologue thereof;
(iv) said nucleic acid encoding a WAK-like polypeptide encodes any one of the polypeptides listed in Table A1 or is a portion of such a nucleic acid, or a nucleic acid capable of hybridizing with such a nucleic acid, wherein said WAK-like polypeptide comprises an EGF domain and a transmembrane domain;
(v) said nucleic acid encoding a WAK-like polypeptide encodes an orthologue or paralogue of any of the polypeptides given in Table A1, wherein said WAK-like polypeptide comprises an EGF domain and a transmembrane domain; or
(vi) said nucleic acid encoding a WAK-like polypeptide encodes a polypeptide comprising the amino acid sequence of SEQ ID NO: 2 or 4.

104. The method of claim 93, wherein said nucleic acid is operably linked to a constitutive promoter, a medium strength constitutive promoter, a plant promoter, a GOS2 promoter, or a GOS2 promoter from rice.

105. A plant, plant part or plant cell, or a seed or progeny of said plant, obtained by the method of claim 93, wherein said plant, plant part or plant cell, or said seed or progeny, comprises a recombinant nucleic acid encoding said UPA20-like polypeptide or said WAK-like polypeptide.

106. A method for increasing yield in a plant relative to a control plant, comprising introducing and expressing in a plant a nucleic acid encoding a CDKB-RKA polypeptide, wherein said CDKB-RKA polypeptide is a modified CDKB polypeptide and has reduced catalytic kinase activity as compared to a wild-type CDKB polypeptide.

107. The method of claim 106, wherein:
(i) said CDKB-RKA polypeptide lacks catalytic kinase activity;
(ii) said CDKB-RKA polypeptide is a mutated CDKB polypeptide;
(iii) said CDKB-RKA polypeptide is a CDKB polypeptide comprising a mutated kinase domain;
(iv) said CDKB-RKA polypeptide is a truncated CDKB polypeptide;
(v) said CDKB-RKA polypeptide is a truncated CDKB polypeptide comprising a deletion in the C-terminal half of said CDKB polypeptide that reduces, and preferably substantially inactivates, the kinase activity of said CDKB polypeptide;
(vi) said CDKB-RKA polypeptide is a truncated CDKB polypeptide comprising a deletion of the kinase domain of said wild-type CDKB polypeptide;
(vii) said CDKB-RKA polypeptide is a truncated CDKB polypeptide comprising a deletion of a part of the kinase domain of said wild-type CDKB polypeptide, and wherein said part preferably comprises at least 1, 2, 3, 4, 5, 6, 7, 8, 9, 10, 11 or 12 amino acids;
(viii) said CDKB-RKA polypeptide comprises a kinase domain having a conserved domain from amino acid 140 to 152 of SEQ ID NO: 320;
(ix) said CDKB polypeptide has cyclin-binding activity;
(x) said CDKB-RKA polypeptide comprises a cyclin binding domain, preferably the PPTALRE motif with no mismatches or with a mismatch at position 2 and/or 4 from left to right, and more preferably the motif of SEQ ID NO: 403 or SEQ ID NO: 404;
(xi) said CDKB-RKA polypeptide comprises a protein kinase inhibitory domain; and/or
(xii) said CDKB-RKA polypeptide lacks a T-loop activation kinase domain.

108. The method of claim 106, wherein said nucleic acid encoding an CDKB-RKA is:
(i) a nucleic acid encoding any one of the polypeptides listed in Table A2;
(ii) a nucleic acid encoding an orthologue or paralogue of any of the polypeptides given in Table A2;
(iii) a portion of the nucleic acid of (i) or (ii); or
(iv) a nucleic acid capable of hybridizing with the nucleic acid of (i) or (ii).

109. The method of claim 106, wherein:
(i) said nucleic acid encodes a polypeptide comprising the amino acid sequence of SEQ ID NO: 318, or a homologue, orthologue or paralogue thereof, or a portion of said nucleic acid, or a nucleic acid capable of hybridizing with said nucleic acid; or
(ii) said nucleic acid encodes a polypeptide having at least about 30-40%, 41-50%, 51-60%, 61-70%, 71-80%, 81-85%, 86-90%, 91-95%, 96-99% or more than 99% overall sequence identity to SEQ ID NO: 318.

110. The method of claim 106, wherein said nucleic acid encoding a CDKB-RKA polypeptide is of plant origin, from a dicotyledonous plant, from a plant of the family Brassicaceae, from a plant of the genus Arabidopsis, or from a Arabidopsis thaliana plant.

111. The method of claim 106, wherein said increased yield comprises (i) increased seed yield and/or (ii) increased vegetative biomass, such as increased leaf biomass and/or increased root biomass, relative to a control plant.

112. The method of claim 106, wherein said increased yield is obtained under non-stress conditions.

113. The method of claim 106, wherein said nucleic acid is operably linked to a constitutive promoter, a constitutive plant promoter or a medium strength constitutive plant promoter.

114. A transgenic plant, plant part or plant cell, or a seed or progeny of said plant, obtained by the method of claim 106, wherein said plant, plant part or plant cell, or said seed or progeny, comprises a recombinant nucleic acid encoding said CDKB-RKA polypeptide.

115. A construct comprising:
(i) a nucleic acid encoding a UPA20-like polypeptide or a WAK-like polypeptide as defined in claim 93, or a nucleic acid encoding a CDKB-RKA polypeptide which is a modified CDKB polypeptide and has reduced catalytic kinase activity as compared to a wild-type CDKB polypeptide;
(ii) one or more control sequences capable of driving expression of the nucleic acid of (i); and optionally
(iii) a transcription termination sequence.

116. The construct of claim 115, wherein:
(i) said nucleic acid encodes a UPA20-like polypeptide or a WAK-like polypeptide, and wherein one of the control sequences is a constitutive promoter, a medium strength constitutive promoter, a plant promoter, a GOS2 promoter, or a GOS2 promoter from rice; or
(ii) said nucleic acid encodes a CDKB-RKA polypeptide, and wherein one of said control sequences is a constitutive promoter, a constitutive plant promoter or a medium strength constitutive plant promoter.

117. A plant, plant part or plant cell transformed with the construct of claim 115.

118. A method for the production of a transgenic plant having an enhanced yield-related trait relative to a control plant, preferably increased yield relative to a control plant, and more preferably increased seed yield and/or increased biomass relative to a control plant, comprising:
(i) introducing and expressing in a plant cell or plant a nucleic acid encoding a UPA20-like polypeptide or a WAK-like polypeptide as defined in claim 93, or a nucleic acid encoding a CDKB-RKA polypeptide which is a modified CDKB polypeptide and has reduced catalytic kinase activity as compared to a wild-type CDKB polypeptide; and
(ii) cultivating said plant cell or plant under conditions promoting plant growth and development.

119. A transgenic plant having an enhanced yield-related trait relative to a control plant resulting from modulated expression of a nucleic acid encoding a UPA20-like polypeptide or a WAK-like polypeptide as defined in claim 93, or a nucleic acid encoding a CDKB-RKA polypeptide, or a transgenic plant cell derived from said transgenic plant, wherein:
(i) said nucleic acid encodes a UPA20-like polypeptide, and wherein said enhanced yield-related trait preferably comprises increased yield relative to a control plant, or more preferably comprises increased seed yield relative to a control plant;
(ii) said nucleic acid encodes a WAK-like polypeptide, and wherein said enhanced yield-related trait preferably comprises increased yield relative to a control plant, or more preferably comprises increased seed yield and/or increased biomass relative to a control plant; or
(iii) said nucleic acid encodes a CDKB-RKA polypeptide which is a modified CDKB polypeptide and has reduced catalytic kinase activity as compared to a wild-type CDKB polypeptide, and wherein said enhanced yield-related trait preferably comprises increased yield relative to a control plant, or more preferably comprises increased seed yield and/or increased biomass relative to a control plant.

120. The transgenic plant of claim 119, or a transgenic plant cell derived therefrom, wherein said plant is a crop plant, a monocotyledonous plant or a cereal, or wherein said plant is beet, sugarbeet, alfalfa, sugarcane, rice, maize, wheat, barley, millet, rye, triticale, sorghum, emmer, spelt, einkorn, teff, milo or oats.

121. Harvestable parts of the transgenic plant of claim 119, wherein:
(i) said harvestable parts comprise a recombinant nucleic acid encoding said UPA20-like polypeptide and are preferably shoot biomass and/or seeds;
(ii) said harvestable parts comprise a recombinant nucleic acid encoding said WAK-like polypeptide and are preferably shoot biomass and/or seeds; or
(iii) said harvestable parts comprise a recombinant nucleic acid encoding said CDKB-RKA polypeptide and are preferably seeds.

122. Products derived from the transgenic plant of claim 119 and/or from harvestable parts of said plant.

123. A method for the production of a product comprising:
(i) growing the transgenic plant of claim 119; and
(ii) producing a product from or by said plant, or part or seeds thereof.

124. The construct of claim 115 comprised in a plant cell or a recombinant chromosomal DNA comprising said construct.

125. An isolated nucleic acid molecule selected from the group consisting of:
(i) a nucleic acid molecule comprising the nucleotide sequence of SEQ ID NO: 458, 460 or 496, or the complement thereof;
(ii) a nucleic acid molecule encoding a UPA20-like polypeptide comprising the amino acid sequence of SEQ ID NO: 459, 461 or 497;
(iii) a nucleic acid molecule encoding a UPA20-like polypeptide having at least 50%, 51%, 52%, 53%, 54%, 55%, 56%, 57%, 58%, 59%, 60%, 61%, 62%, 63%, 64%, 65%, 66%, 67%, 68%, 69%, 70%, 71%, 72%, 73%, 74%, 75%, 76%, 77%, 78%, 79%, 80%, 81%, 82%, 83%, 84%, 85%, 86%, 87%, 88%, 89%, 90%, 91%, 92%, 93%, 94%, 95%, 96%, 97%, 98% or 99% sequence identity to the amino acid sequence of SEQ ID NO: 459, 461 or 497, and additionally or alternatively comprising one or more motifs having at least 50%, 55%, 60%, 65%, 70%, 75%, 80%, 85%, 90%, 95%, 96%, 97%, 98%, 99% or more sequence identity to any one or more of motifs 2 to 13 comprising the amino acid sequence of SEQ ID NO: 538, 539, 540, 541, 542, 543, 556, 557, 558, 559, 560 and 561, and further preferably conferring an enhanced yield-related trait in a plant relative to a control plant; and
(iv) a nucleic acid molecule which hybridizes with the nucleic acid molecule of (i) or (ii) under high stringency hybridization conditions and preferably confers an enhanced yield-related trait in a plant relative to a control plant.

126. An isolated polypeptide selected from the group consisting of:
(i) a polypeptide encoded by the isolated nucleic acid molecule of claim 125 and comprising the amino acid sequence of SEQ ID NO: 459, 461 or 497;
(ii) a polypeptide comprising an amino acid sequence having at least 50%, 51%, 52%, 53%, 54%, 55%, 56%, 57%, 58%, 59%, 60%, 61%, 62%, 63%, 64%, 65%, 66%, 67%, 68%, 69%, 70%, 71%, 72%, 73%, 74%, 75%, 76%, 77%, 78%, 79%, 80%, 81%, 82%, 83%, 84%, 85%, 86%, 87%, 88%, 89%, 90%, 91%, 92%, 93%, 94%, 95%, 96%, 97%, 98% or 99% sequence identity to the amino acid sequence of SEQ ID NO: 459, 461 or 497, and additionally or alternatively comprising one or more motifs having at least 50%, 55%, 60%, 65%, 70%, 75%, 80%, 85%, 90%, 95%, 96%, 97%, 98%, 99% or more sequence identity to any one or more of motifs 2 to 13 comprising the amino acid sequence of SEQ ID NO: 538, 539, 540, 541, 542, 543, 556, 557, 558, 559, 560 and 561, and further preferably conferring an enhanced yield-related trait in a plant relative to a control plant; and
(iii) derivatives of any of the polypeptide of (i) or (ii).
